(19) United States
(12) Patent Application Publication
(10) Pub. No.: US 2021/0292846 A1
(43) Pub. Date: Sep. 23, 2021

(54) Methods of Assessing the Risk for the Development of a Condition in a Uveal Melanoma (UVM) Patient

(71) Applicant: THOMAS JEFFERSON UNIVERSITY, Philadelphia, PA (US)

(72) Inventors: Isidore Rigoutsos, Astoria, NY (US); Eric Londin, Wynnewood, PA (US); Rogan G. Magee, Philadelphia, PA (US)

(21) Appl. No.: 17/206,796

(22) Filed: Mar. 19, 2021

Related U.S. Application Data
(60) Provisional application No. 62/991,936, filed on Mar. 19, 2020.

(51) Int. Cl. C12Q 1/6886; G16B 25/10

(52) U.S. Cl. CPC C12Q 1/6886; G16B 25/10; C12Q 2600/106; C12Q 2600/178; C12Q 2600/118

(57) ABSTRACT

The present disclosure provides a method for assessing whether a uveal melanoma (UVM) patient has, or is at risk of developing a condition, the method comprising measuring the abundance of at least two isomiRs, and/or at least one tRNA derived fragment (tRF), in a biological sample obtained from the patient, and computing the difference in abundance of the at least two isomiRs and at least one tRF as an indication that the subject either has, or is at risk of developing, or is at a given stage of the condition.

### CROSS-REFERENCE TO RELATED APPLICATIONS

[0001] This application claims priority under 35 U.S.C. § 119(e) to U.S. Provisional Patent Application No. 62/991,936, filed Mar. 19, 2020, the contents of which are incorporated by reference herein in their entirety.

### STATEMENT REGARDING FEDERALLY SPONSORED RESEARCH OR DEVELOPMENT

[0002] This invention was made with government support under CA195204 awarded by the National Institutes of Health. The government has certain rights in the invention.

### SEQUENCE LISTING

[0003] The ASCII text file named “205961-7040US1 Sequence Listing,” created on Mar. 19, 2021, comprising 1,109 Kbytes, is hereby incorporated by reference in its entirety.

### BACKGROUND OF THE INVENTION

[0004] Uveal melanoma (UVM) arises from melanocytes of the uveal tract and is the most common primary intraocular malignancy in adults. With approximately 2,500 new U.S. cases annually, UVM accounts for ˜5% of diagnosed melanomas. UVMs occur anywhere within the uveal tract, but the choroid and ciliary bodies are the most frequent locations (˜90%). Approximately 40% patients develop metastases within 10 years, irrespective of treatment type, but this strongly correlates to tumor size and stage of tumor at diagnosis. Currently, the primary treatment for UVM is surgery or radiation. Despite treatment options, uveal melanoma shows a high propensity for liver metastasis, with less than 12 month median survival.

[0005] There is a need in the art for practical and reliable tests to diagnose and evaluate uveal melanoma. The present invention addresses this need.

### BRIEF SUMMARY OF THE INVENTION

[0006] The present disclosure provides a method for assessing whether a uveal melanoma (UVM) patient has, or is at risk of developing a condition, the method comprising measuring the abundance of at least two isomiRs, and/or at least one tRNA derived fragment (tRF), in a biological sample obtained from the patient, and computing the difference in abundance of the at least two isomiRs and at least one tRF, wherein the difference is an indication that the subject either has, or is at risk of developing, or is at a given stage of the condition.

[0007] In certain embodiments, each isomiR of the at least two isomiRs is encoded by a sequence selected from the group consisting of SEQ ID NOs:1-1677. In certain embodiments, each tRF of the at least one tRF is encoded by a sequence selected from the group consisting of SEQ ID NOs:1678-5511.

[0008] In certain embodiments, if the abundance of the at least two isomiRs or the abundance of the at least one tRF in the biological sample differ from the abundance of the same molecules in the reference sample, the patient is determined as having, being at risk of developing, or being at a given stage of the condition.

[0009] In certain embodiments, the difference comprises a ratio of the abundance of the at least two isomiRs or the at least one tRF in the biological sample and the abundance of the same molecules in the reference sample, wherein the ratio has a log 2 value with an absolute value greater than or equal to 1.

[0010] In certain embodiments, the condition is metastasis.

### BRIEF DESCRIPTION OF THE DRAWINGS

[0011] The following detailed description of preferred embodiments of the invention will be better understood when read in conjunction with the appended drawings. For the purpose of illustrating the invention, there are shown in the drawings embodiments which are presently preferred. It should be understood, however, that the invention is not limited to the precise arrangements and instrumentalities of the embodiments shown in the drawings.

[0012] FIGS. 1A-1B depict profiling of UVM isomiRs. FIG. 1A: each bar is a miRNA arm and the y-axis is the number of isomiRs produced by that locus. Shown are the top-20 isomiR-producing loci. FIG. 1B: an example of the expression of isomiRs from the miR-140-3p locus. The y-axis shows the abundance for each shown isomiR in reads-per-million (RPM)—note that the axis is logarithmic (base 2). The leftmost box is the ‘0|0’ isomiR. Boxes labeled “green” indicate those isomiRs in which the median expression level is greater than the median expression level of the ‘0|0’ isomiR. Boxes labeled “yellow” represent isomiRs in which the median expression level is less than that of the ‘0|0’ isomiR. The dashed line shows the median expression of the ‘0|0’ isomiR.

[0013] FIGS. 2A-2F depict profiling of UVM tRFs. FIG. 2A: percentage of tRFs as a function of genomic origin—mitochondrial (MT) or nuclear (Nuc)—and structural type. Here, the relative distribution of all reads mapping to tRFs is shown as a function of the possible structural types and genomic origins. The tRFs that align to the mature tRNA can belong to one of five structural types and can originate in either the nuclear or mitochondrial genomes. FIG. 2B: relative distribution of all reads mapping to tRFs as a function of the isoacceptors of origin—only the top 10 isoacceptors are shown. FIG. 2C: relative distribution of all reads mapping to tRFs as a function of tRF length, for both nuclear and MT tRFs. Here, only tRFs with lengths between 16 and 30nt across the 80 UVM samples are considered. FIG. 2D: relative distribution of all reads mapping to tRFs as a function of tRF length, for patients that did or did not develop metastasis. FIG. 2E: relative distribution of all reads mapping to tRFs as a function of tRF length, for M3 and D3 patients, respectively. FIG. 2F: relative distribution of all reads mapping to tRFs as a function of tRF length, for patients with or without a mutation in the EIF1AX gene. P-values were determined by t-tests. ** indicates a P-value ≤0.01.

[0014] FIGS. 3A-3F depict the differential abundance of various isomiRs with heatmaps showing the most differentially abundant isomiRs for the classification of UVM based upon different clinical attributes (columns within each of FIGS. 3A-3F): patients who have died versus those who were still alive at last clinical visit (column A), patients who developed metastatic disease versus those who do not (column B), M3 or D3 patients (column C), patients with or without a BAP1 mutation (column D), and patients with or without a mutation in either the EIF1AX or SF3B1 genes (column E). Each row corresponds to a different isomiR. For a given column, each cell depicts the log 2 fold change for the respective isomiR. The isomiRs that correspond to the miR-508/514 cluster and the miR-199a/b locus are indicated. White cells indicate that the isomiR was not differentially abundant for that particular comparison. Cells labeled “red” indicate those isomiRs with increased expression in the relevant category whereas cells labeled “green” indicates those isomiRs with decreased expression in the relevant category.

[0015] FIG. 3G provides a key and histogram relating color intensity of FIGS. 3A-3F to log 2 fold change and isomiR counts.

[0016] FIGS. 4A-4F depict survival analyses of isomiRs and tRFs. Several Kaplan-Meier curves are shown for representative isomiRs and tRFs. In all cases, the samples were grouped based upon whether the expression of the isomiR in question was above the total mean (see labeled lines) or below the total mean (see labeled lines) in that sample. The x-axis is the time to development of metastasis (in days), while the y-axis shows the relative survival function for patients who were segmented in groups based on the abundance of the corresponding molecule. FIGS. 4A-4D show representative isomiRs (SEQ ID NOs: 88, 161, 279, and 27). FIG. 4E and FIG. 4F show representative tRFs (SEQ ID NOs: 1725 and 2921).

[0017] FIG. 5 compares the number of isomiRs that are differentially abundant in each of the shown comparisons.

[0018] FIG. 6 depicts the differential abundance of different mature miRNA arms in various pairwise comparisons. The heatmap shows miRNA arms with characteristic differential abundance for different clinical attributes (columns): patients with or without a BAP1 mutation, M3 or D3 patients, patients who developed metastatic disease versus those who did not, patients with or without a mutation in either the EIF1AX or SF3B1 genes, and patients who have died versus those who were still alive at last clinical visit. Shown is the log 2 of the fold change for each comparison. Each row represents a different miRNA arm. Cells that are not labeled “red” or “blue” correspond to comparisons where the aggregate isomiR abundance from the respective miRNA arm was not differentially abundant for that particular comparison.

### DETAILED DESCRIPTION

### Definitions

[0019] Unless defined otherwise, all technical and scientific terms used herein have the same meaning as commonly understood by one of ordinary skill in the art to which the invention pertains. Although any methods and materials similar or equivalent to those described herein can be used in the practice for testing of the present invention, the preferred materials and methods are described herein. In describing and claiming the present invention, the following terminology will be used.

[0020] It is also to be understood that the terminology used herein is for the purpose of describing particular embodiments only, and is not intended to be limiting.

[0021] The articles “a” and “an” are used herein to refer to one or to more than one (i.e., to at least one) of the grammatical object of the article. By way of example, “an element” means one element or more than one element.

[0022] “About” as used herein when referring to a measurable value such as an amount, a temporal duration, and the like, is meant to encompass variations of 20% or ±10%, more preferably ±5%, even more preferably 10%, and still more preferably +0.1% from the specified value, as such variations are appropriate to perform the disclosed methods.

[0023] “Biological sample” or “sample” as used herein means a biological material isolated from an individual. The biological sample may contain any biological material suitable for detecting the desired biomarkers, and may comprise cellular and/or non-cellular material obtained from the individual. A biological sample may be of any biological tissue or fluid. Frequently the sample will be a “clinical sample” which is a sample derived from a patient. Typical clinical samples include, but are not limited to, bodily fluid samples such as synovial fluid, sputum, blood, urine, blood plasma, blood serum, sweat, mucous, saliva, lymph, bronchial aspirates, peritoneal fluid, cerebrospinal fluid, and pleural fluid, and tissues samples such as blood-cells (e.g., white cells), tissue or fine needle biopsy samples and abscesses or cells therefrom. Biological samples may also include sections of tissues, such as frozen sections or formalin fixed sections taken for histological purposes.

[0024] The terms “biomarker” or “marker,” as used herein, refers to a molecule that can be detected. Therefore, a biomarker according to the present invention includes, but is not limited to, an oligonucleotide, an oligopeptide, a nucleic acid, a polynucleotide, a polypeptide, a carbohydrate, a lipid, an inorganic molecule, an organic molecule, each of which may vary widely in size and properties. A “biomarker” can be a bodily substance relating to a bodily condition or disease. A “biomarker” can be detected using any means known in the art or by a previously unknown means that only becomes apparent upon consideration of the marker by the skilled artisan.

[0025] The term “biomarker (or marker) expression” as used herein, encompasses the transcription, translation, post-transcriptional modification, post-translational modification, and phenotypic manifestation of a gene, including all aspects of the transformation of information encoded in a gene into RNA or protein. By way of non-limiting example, marker expression includes transcription into messenger RNA (mRNA) and translation into protein. Measuring a biomarker also includes reverse transcription of RNA into cDNA (i.e. for reverse transcription-qPCR measurement of RNA levels.).

[0026] As used herein, “biomarker” in the context of the present invention encompasses, without limitation, proteins, nucleic acids, and metabolites, together with their polymorphisms, mutations, variants, modifications, subunits, fragments, protein-ligand complexes, and degradation products, protein-ligand complexes, elements, related metabolites, and other analytes or sample-derived measures. Biomarkers can also include mutated proteins or mutated nucleic acids. Biomarkers also encompass non-blood borne factors or non-analyte physiological markers of health status, such as clinical parameters, as well as traditional laboratory risk factors. As defined by the Food and Drug Administration (FDA), a biomarker is a characteristic (e.g. measurable DNA and/or RNA) that is “objectively measured and evaluated as an indicator of normal biologic processes, pathogenic processes, or pharmacologic responses to a therapeutic intervention or other interventions”. Biomarkers also include any calculated indices created mathematically or combinations of any one or more of the foregoing measurements, including temporal trends and differences.

[0027] As used herein, an “instructional material” includes a publication, a recording, a diagram, or any other medium of expression which can be used to communicate the usefulness of a component of the invention in a kit for detecting biomarkers disclosed herein. The instructional material of the kit of the invention can, for example, be affixed to a container which contains the component of the invention or be shipped together with a container which contains the component. Alternatively, the instructional material can be shipped separately from the container with the intention that the instructional material and the component be used cooperatively by the recipient.

[0028] The terms “abundance” or “level” as used herein means the absolute or relative amount or concentration of one or more biomarkers in a sample as determined by measuring mRNA, cDNA or protein, or any portion thereof such as oligonucleotide, polynucleotide, oligopeptide, or polypeptide.

[0029] “IsomiR” as the term is used herein, refers to an isoform of a microRNA (miRNA). IsomiRs are RNA molecules that comprise a small number of nucleotides (e.g. 18 or more nucleotides) and can be produced from the same arm of a given miRNA precursor molecule. Any two isomiRs from the same miRNA arm share many of their nucleotides and differ in their endpoints. An isomiR can be post-transcriptionally modified through the addition of one or more nucleotides.

[0030] “Measuring” or “measurement,” or alternatively “detecting” or “detection,” means determining the presence, absence, quantity or amount (which can be an effective amount) of either a given substance within a clinical or subject-derived sample, including the derivation of qualitative or quantitative concentration levels of such substances, or otherwise determining the values or categorization of a subject's clinical parameters.

[0031] The terms “patient,” “subject,” “individual,” and the like are used interchangeably herein, and refer to any animal, or cells thereof whether in vitro or in situ, amenable to the methods described herein. In certain non-limiting embodiments, the patient, subject or individual is a human.

[0032] A “reference level” or “reference abundance” of a biomarker means a level of the biomarker that is indicative of the absence of a particular disease state or phenotype. When the level of a biomarker in a subject is above (or below) the reference level of the biomarker it is indicative of the presence of a particular disease state or phenotype. When the level of a biomarker in a subject is about the same as the reference level of the biomarker it is indicative of a lack of a particular disease state or phenotype.

[0033] As used herein, the term “tRNA derived fragment” or “tRF” refers to a fragment a transfer RNA (tRNA) precursor molecule or of a mature tRNA molecule. A tRF is an RNA molecule that comprises a small number of nucleotides (e.g. 16 or more nucleotides) and is a portion of a precursor tRNA or of a mature tRNA. A tRF can be post-transcriptionally modified through the addition of one or more nucleotides.

[0034] As used herein, the term “uveal melanoma” or “UVM” refers to a cancer that arises from melanocytes that are resident in the uveal tract. The uveal tract comprises the iris, the choroid, and the stroma of the ciliary body.

[0035] Ranges: throughout this disclosure, various aspects of the invention can be presented in a range format. It should be understood that the description in range format is merely for convenience and brevity and should not be construed as an inflexible limitation on the scope of the invention. Accordingly, the description of a range should be considered to have specifically disclosed all the possible subranges as well as individual numerical values within that range. For example, description of a range such as from 1 to 6 should be considered to have specifically disclosed subranges such as from 1 to 3, from 1 to 4, from 1 to 5, from 2 to 4, from 2 to 6, from 3 to 6 etc., as well as individual numbers within that range, for example, 1, 2, 2.7, 3, 4, 5, 5.3, and 6. This applies regardless of the breadth of the range.

### DESCRIPTION

[0036] As stated elsewhere herein, Uveal melanoma (UVM) is the most common primary intraocular malignancy in adults, and, in spite of the treatment options available, UVM shows a high propensity for liver metastasis, with a median survival time of less than 12 months. In UVM, molecular disease features strongly correlate with clinical outcomes. For example, chromosomal abnormalities monosomy of chromosome 3 (M3) are commonly detected and associated with increased metastasis and poorer overall prognosis. Loss of function of the 3p21 BRCA Associated Protein 1 (BAP1) gene, either through mutations or decreased expression, correlates with M3 phenotype. Conversely SRSF2/SF3B1 and EIF1AX mutant tumors have distinct copy number alterations and DNA methylation profiles that associate with the better overall prognosis of the disomy 3 (D3) phenotype.

[0037] While the genome's contributions to the disease have been well-studied, it is clear that additional unknown disease mechanisms remain. One such mechanism may relate to short non-coding RNAs (ncRNAs). Two categories of short ncRNAs with demonstrated regulatory roles and emerging strong relevance for UVM are the isoforms of microRNAs (miRNAs), and transfer RNA (tRNA) derived fragments.

[0038] MiRNAs are the best-studied ncRNAs to date. These ˜22 nucleotide (nts) RNAs modulate the abundance of proteins and of long non-coding RNAs (lncRNAs) in a sequence-dependent manner. As previously shown, one miRNA can target hundreds to thousands of protein-coding genes through target sites in the coding sequence, 5′ untranslated region (UTR), or 3′-UTR of messenger RNAs (mRNAs). MiRNAs operate through several mechanisms, including translational inhibition, disruption of cap-tail interactions, or exonuclease-mediated mRNA degradation.

[0039] Early deep-sequencing studies reported expression of multiple isoforms of miRNAs (isomiRs) that were initially dismissed as aberrant. However, it has been shown that isomiRs are produced constitutively and exhibit tissue-specific abundance profiles, and that some miRNA arms produce more than 30 distinct isomiRs. Importantly, the present inventors have demonstrated that isomiRs from the same miRNA target different mRNAs. Thus, isomiR expression greatly increases the number of target mRNAs regulated by miRNAs. Notably, the most abundant isomiR from a given miRNA locus generally varies amongst different tissues. Presumably, this tissue-dependence corresponds to specific regulatory needs.

[0040] This last observation becomes even more relevant when considering that the tissue-specific patterns of isomiR expression are modulated further by individual attributes such as a person's sex, race/ethnicity and population origin, as well as disease type and subtype. Several thousand novel tissue-specific and human-specific miRNA loci have been recently described. These novel miRNA loci produce isomiRs that drive tissue-specific regulatory events that are currently-uncharacterized and cannot be captured by mouse models as these sequences do not exist in rodents.

[0041] It is now known that tRNAs produce short ncRNAs, named tRNA-derived fragments (tRFs). Studies have shown that tRFs are not products of random degradation. In fact, some tRFs target mRNAs in a miRNA-like manner. Recent work with human tissues have demonstrated that tRFs are produced constitutively and their profiles depend on a person's sex, race/ethnicity, and population origin, as well as on tissue type, tissue state, and disease, in an analogous manner to the isomiR findings. tRFs have also been shown to decoy RNA-binding proteins, and to displace mRNAs from the active ribosome.

[0042] While earlier studies looked at miRNAs from the standpoint of locus expression, efforts to investigate the roles of isomiRs and tRFs in UVM are scarce, if at all present.

[0043] Thus, the present disclosure provides the findings from an analysis of these two categories of mRNA regulators across the 80 samples of the TCGA UVM cohort. Specifically, the correlation of isomiR/tRF profiles with clinical outcomes was examined. Particular attention was also provided to identify genomic loci that harbor previously unreported miRNA precursors with UVM-specific transcription. IsomiRs, tRFs, and previously-unreported miRNA loci represent novel and uncharacterized regulators of UVM biology.

[0044] Without wishing to be limited by theory, it has now been unexpectedly discovered that differences in the abundance of isomiRs and tRFs relative to control may be assessed in order to determine the clinical attributes of uveal melanoma patients. In various aspects and embodiments, the invention provides methods for assessing the state of a uveal melanoma patient, the method comprising measuring the levels of two or more isoforms of one or more miRNAs (isomiRs) and/or tRNA derived fragments (tRFs) in a sample obtained from the patient; determining the differential abundance of the one or more isomiRs and/or tRFs; and comparing the differential abundance of the one or more isomiRs and/or tRFs.

[0045] As shown in the figures and the example below, the differential abundance of short non-coding RNAs is diagnostic with respect to a variety of patient attributes as well as prognostic. All of these are contemplated and considered to be within the scope of the various embodiments of the invention. In various embodiments, the clinical attribute may be mortality, cancer metastases, M3/D3 status, BAP1 mutation status, or EIF1AX/SF3B1 mutation status. Assessing the mortality of the patient, as used herein, means assessing the patient's likelihood of survival over a given timeframe, with respect to UVM. M3/D3 status refers to the monosomy (M3) or disomy (D3) of chromosome 3. M3 is associated with increased metastasis and poorer overall prognosis. Similarly, patients with a mutation in the BAP1 gene have an overall higher risk of progressing to metastatic disease.

[0046] In various embodiments, the isomiRs or tRFs are compared to an appropriate control. By way of nonlimiting example, when the condition to be assessed is BAP1 mutation status, an appropriate control is the level of the analogous isomiRs or tRFs from a BAP 1 wild-type patient.

[0047] The present disclosure provides a method for assessing whether a uveal melanoma (UVM) patient has, or is at risk of developing a condition, the method comprising:
[0048] (a) measuring in a biological sample obtained from the patient the abundance of at least one of:
   [0049] (i) at least two isoforms (isomiRs) of at least one miRNA; and
   [0050] (ii) at least one tRNA derived fragment (tRF);
[0051] (b) computing a difference in the abundance of at least one of:
   [0052] (i) the at least two isomiRs of at least one miRNA; and
   [0053] (ii) the at least one tRF;
[0054] in the biological sample as compared to the abundance of the same molecules in a reference sample,
   [0055] wherein the difference that results from the computing is an indication that the subject either has, or is at risk of developing, or is at a given stage of the condition.

[0056] In certain embodiments, the condition is metastasis.

[0057] In certain embodiments, each isomiR of the at least two isomiRs is encoded by a sequence selected from the group consisting of SEQ ID NOs:1-1677.

[0058] In certain embodiments, each tRF of the at least one tRF is encoded by a sequence selected from the group consisting of SEQ ID NOs:1678-5511.

[0059] In certain embodiments, the abundance of both the at least two isomiRs and the at least one tRF are measured in the biological sample.

[0060] In certain embodiments, if the abundance of the at least two isomiRs in the biological sample differ from the abundance of the same molecules in the reference sample, the patient is determined as having, being at risk of developing, or being at a given stage of the condition.

[0061] In certain embodiments, the abundance of the at least two isomiRs in the biological sample are greater than the abundance of the same molecules in the reference sample. In certain embodiments, at least one of the at least two isomiRs is encoded by a sequence selected from the group consisting of SEQ ID NO:88 and SEQ ID NO:161.

[0062] In certain embodiments, the abundance of the at least two isomiRs in the biological sample are less than the abundance of the same molecules in the reference sample. In certain embodiments, at least one of the at least two isomiRs is encoded by a sequence selected from the group consisting of SEQ ID NO:279 and SEQ ID NO:30.

[0063] In certain embodiments, if the abundance of the at least one tRF in the biological sample differ from the abundance of the same molecules in the reference sample, the patient is determined as having, being at risk of developing, or being at a given stage of the condition. In certain embodiments, if the abundance of both of the at least two isomiRs and the the at least one tRF in the biological sample differ from the abundance of the same molecules in the reference sample, the patient is determined as having, being at risk of developing, or being at a given stage of the condition.

[0064] In certain embodiments, the difference comprises a ratio of the abundance of the at least two isomiRs in the biological sample and the abundance of the same molecules in the reference sample, wherein the ratio has a log 2 value with an absolute value greater than or equal to 1. In certain embodiments, the difference comprises a ratio of the abundance of the at least one tRF in the biological sample and the abundance of the same molecules in the reference sample, wherein the ratio has a log 2 value with an absolute value greater than or equal to 1.

[0065] In certain embodiments, the ratio has a log 2 with an absolute value greater than or equal to 2. In certain embodiments, the ratio has a log 2 with an absolute value greater than or equal to 3. In certain embodiments, the ratio has a log 2 with an absolute value greater than or equal to 4. In certain embodiments, the ratio has a log 2 with an absolute value greater than or equal to 5. In certain embodiments, the ratio has a log 2 with an absolute value greater than or equal to 6. In certain embodiments, the ratio has a log 2 with an absolute value greater than or equal to 7. In certain embodiments, the ratio has a log 2 with an absolute value greater than or equal to 8. In certain embodiments, the ratio has a log 2 with an absolute value greater than or equal to 9. In certain embodiments, the ratio has a log 2 with an absolute value greater than or equal to 10.

[0066] In certain embodiments, the measuring comprises subjecting the biological sample to deep sequencing. In certain embodiments, the measuring comprises subjecting the biological sample to a polymerase chain reaction (PCR). In certain embodiments, the PCR can ensure the identity of the endpoints of the molecule being measured. In certain embodiments, the PCR comprises a modified quantitative reverse transcription PCR (qRT-PCR), including but not limited to “dumbbell PCR”. In various aspects and embodiments, the step of determining the differential abundance of the one or more isomiRs and/or tRFs is done by the use of standard tools such as the Significance Analysis of Microarrays for RNA-seq data (SAMseq), the differential expression analysis for sequence count data (DEseq) and others.

[0067] In certain embodiments, the method further comprises recommending a therapeutic regimen.

### EXPERIMENTAL EXAMPLES

[0068] The invention is further described in detail by reference to the following experimental examples. These examples are provided for purposes of illustration only, and are not intended to be limiting unless otherwise specified. Thus, the invention should in no way be construed as being limited to the following examples, but rather, should be construed to encompass any and all variations which become evident as a result of the teaching provided herein.

[0069] Without further description, it is believed that one of ordinary skill in the art can, using the preceding description and the following illustrative examples, make and utilize the compounds of the present invention and practice the claimed methods. The following working examples therefore, specifically point out the preferred embodiments of the present invention, and are not to be construed as limiting in any way the remainder of the disclosure.

### Materials and Methods

### Datasets

[0070] Short RNA-seq data and associated clinical information for 80 primary UVM samples were downloaded from the Genomic Data Commons Data Portal.

### Sequence Read Mapping

[0071] Sequenced reads were quality trimmed and adaptors removed using the cutadapt tool. The resulting collection of reads was mapped unambiguously using SHRIMP2. Reads were mapped to the human genome assembly hg19/GRCh37 in order to enable comparisons with the TCGA consortium's report on UVM. No insertions or deletions were allowed during mapping. At most one replacement was permitted during mapping.

Identification of Novel miRNAs

[0072] To identify novel miRNAs, each UVM dataset was processed independently with miRDeep2, using default parameter settings and a score threshold of ≥1. For all novel miRNA precursors, the most abundant isomiR was identified and labeled the ‘archetype’ sequence for the corresponding locus.

Identification of isomiRs

[0073] Each archetype's miRNAs genomic locus was flanked by six nts on either side. Mapped sequence reads that were contained wholly within those wider windows were treated as belonging to the miRNA precursor and are considered further. Distinct reads that had identical 5′ and 3′ endpoints within a miRNA arm were combined into a single isomiR. The union of all distinct sequences that were identified at each miRNA arm comprise the collection of isomiRs arising from the arm. The isomiR nomenclature scheme used herein has been described in Rigoutsos et. al (Cell, 2014, 136:215-233), which is incorporated herein by reference in its entirety. For isomiRs produced by novel miRNAs, the definition of ‘archetype’ used is described elsewhere herein. For isomiRs produced by miRNAs that are already in a pubic database such as miRBase, archetype is defined as the isoform that the database lists for the corresponding miRNA. For example, the isomiR whose 5′ terminus begins one position to the right (+1) of the archetype's 5′ terminus and whose 3′ terminus ends two positions to the left (−2) of the archetype's 3′ terminus is labeled “+1|-2”. The archetype isomiR for a miRNA arm is denoted by “0|0.”

Identification of tRFs

[0074] The tRF “license plate” notation, as described in Rigoutsos et. al (Bioinformatics, 2016, 32:2481-2489), which is incorporated herein by reference in its entirety, is used herein

Quantification of miRNAs and isomiRs

[0075] IsomiR was quantified abundance in terms of reads per million or RPM. Only reads that were quality trimmed and had their adaptors removed, and could be aligned exactly to miRNA arms, were considered when calculating the RPM value. To calculate the normalized abundance of a miRNA arm, normalized abundances of all isomiRs from the arm were added. Statistically significant miRNAs and isomiRs were identified with the Threshold-seq algorithm whose threshold calculation adapts to sequencing-depth (“adaptive thresholding”). This thresholding was applied separately to each dataset. Additionally, it was required that a miRNA or isomiR exceeded the Threshold-seq's threshold in at least 20 (25%) of the 80 TCGA UVM samples before it entered the analysis.

Quantification of tRFs

[0076] RPM values for tRFs were determined as with miRNAs/isomiRs. For parity, all MINTmap-identified tRFs were further subjected to the same Threshold-seq threshold that was established for the isomiRs of the corresponding dataset. Additionally, as with the miRNAs/isomiRs, the analyses considered only tRFs that were present in at least 20 of the 80 TCGA UVM samples.

Identification of Differentially Abundant miRNAs, isomiRs, and tRFs

[0077] This analysis was performed using 5000 permutations of the Significance Analyses of Microarrays (SAM) algorithm and using a stringent False Discovery Rate (FDR) of 1% and a log 2 fold change threshold of absolute value ≥1 (i.e., ≥2× fold change, either an increase or a decrease).

### Overall Survival Analysis

[0078] To determine overall survival associations with specific miRNAs, isomiRs and tRFs, Kaplan-Meier survival analyses were performed. Briefly, a given molecule split patient samples into an “above mean” and “below mean” group, depending on whether the molecule was expressed at above or below the molecule's total mean value across the samples. Samples were then stratified into these two groups and computed the time to development of metastasis in each group. Log-rank tests describe the significance of any emergent differences.

### Example 1: The miRNAs have Characteristic Profiles in UVM

[0079] Using stringent criteria described elsewhere herein, isomiRs present in the TCGA UVM cohort were characterized. Four hundred and seven unique miRNA arms, producing one or more isomiRs, are expressed in at least 25% of the 80 samples. Interestingly, 32 appear to be UVM-specific: they have not been reported in any other context. Collectively, 407 arms produce 1,677 statistically-significant isomiRs (Table 1). Of the 407 miRNA arms, 112 produce only one isomiR. Thirty-seven arms produce ≥10 isomiRs. FIG. 1A shows the top 20 isomiR-producing miRNA arms. Notably, some of the best-studied miRNA loci (e.g. miR-21-5p, miR-183-5p, miR-143-3p) produce many isomiRs. Similar to previous findings, increased 3′ isomiR variability in UVM, compared to 5′ endpoints was observed. Notably, the top-producer of UVM isomiRs is MD2.ID00112-5p, a novel miRNA that has been reported previously; MD2.ID00112 currently remains uncharacterized.

TABLE 1
Summary of the UVM miRNAome

| Category | Number |
|---|---|
| miRNA arms previously characterized in UVM | 375 |
| miRNA arms not previously characterized in UVM | 32 |
| Total isomiRs expressed in UVM | 1,677 |
| isomiRs previously linked in UVM (i.e. miRbases 0\|0) | 327 |
| isomiRs not previously linked with UVM | 1,350 |
| isomiRs differing from 0}0 only in their 3′ end | 831 |
| isomiRs differing from 0\|0 only in their 5′ end | 187 |
| isomiRs differing from 0\|0 in both their 5′ end and 3′ ends | 332 |
| miRNA arms with a single isomiR | 112 |
| miRNA arms with ≥ 2 isomiRs | 263 |
| miRNA arms not expressing miRbase (0\|0) isoform | 79 |
| miRNA arms where miRbase isoform is not most abundant | 174 |

[0080] For 165 (44%) of the 375 isomiR-producing miRNA arms listed in miRBase, the most abundant isomiR in UVM is not the ‘archetype’. miR-140-3p presents an illustrative example in UVM (FIG. 11n). Four of the five isomiRs that are more abundant than the archetype have “seeds” that differ from the archetype's. Without wishing to be bound by theory, it is because of the different seeds that these four isomiRs may target genes that differ from the genes targeted by miR-140-3p's “0|0” isomiR, thereby contributing to UVM biology in currently uncharacterized ways. Moreover, for another 80 (21.30%) of the 375 miRNA arms in miRBase, the archetype is not present at all in UVMV (Table 1). These observations mirror earlier findings in other tissues and cell types, and lead to an important corollary: focusing on “0|0” isomiRs (miRBase entries) will ignore important regulatory molecules in UVM.

### Example 2: Newly-Discovered miRNA Loci are UVM-Specific

[0081] 32 new miRNA loci were discovered in the 80 samples (U.S. Provisional Patent Application No. 62/991,936). When compared to the other 31 TCGA cancer types, many of these loci produce isomiRs that are either exclusively present in UVM, or prominently abundant in UVM. These novel sequences are ideal candidates to serve as candidate UVM biomarkers.

### Example 3: tRFs have Characteristic Profiles in UVM

[0082] Across the 80 UVM samples, 3,780 unique tRFs have been found. Of these tRFs, 2,286 (60%) are exclusive to the tRNA space, and can only have arisen from tRNA genes. 2,847 (75%) of the tRFs originate in nuclearly-encoded tRNAs, whereas the remaining 933 (25%) derive from mitochondrially-encoded tRNAs. Although the absolute number of tRFs from nuclear tRNAs seems to outweigh that from MT tRNAs, the situation is actually reversed: isodecoder for isodecoder, the 22 MT-encoded tRNAs contribute nine times as many tRFs as the 610 nuclearly-encoded tRNAs.

[0083] The tRFs that overlap the mature tRNA sequence belong to one of five structural categories: 5′-tRFs, i-tRFs, 3′-tRFs, 5′-tRNA halves (5′-tRHs), and 3′-tRNA halves (3′-tRHs). In the UVM samples, the majority of MT-derived tRFs are either 3′-tRFs or i-tRFs (FIG. 2A). On the other hand, nuclearly-encoded tRNAs give rise predominantly to 5′-tRFs (FIG. 2A). The 5′- and 3′-tRHs are under-represented in the UVM samples: the TCGA sequencing protocol specifically enriched for miRNAs (20-24 nts) and ran for only 30 cycles. Given that tRHs are among the most abundant molecules in cells, it follows that many additional, as yet uncharacterized, tRF species exist within the UVM transcriptome.

[0084] Remarkably, 73.15% of the sequenced tRFs are produced by only 10 of the 61 nuclear and 22 MT isoacceptors: MT tRNA^{ValTAC}, MT tRNA^{TyrGTA}, Nuc tRNA^{HisGTG}, Nuc tRNA^{GluTTC}, Nuc tRNA^{ValCAC}, Nuc tRNA^{GlyGCC}, MT tRNA^{ProTGG}, Nuc tRNA^{GluCTC}, Nuc tRNA^{AlaCGC}, and Nuc tRNA^{GlnCTG} (FIG. 2B). This suggests outsized roles for the respective tRNAs. tRFs from MT tRNAs are generally shorter (20-21 nts) whereas tRFs from nuclear tRNAs show peaks at 20 and 23 nts (FIG. 2C). Notably, previous work on the TCGA prostate cancer datasets showed a prominent peak at 18 nts, whereas the triple negative breast cancer TCGA datasets showed the prominent peak at 19 nts. These observations indicate tissue-specific differences in the production of tRFs.

### Example 4: IsomiRs can Serve as Candidate Markers of Disease Progression and Patient Survival

[0085] UVM datasets were stratified by M3 status and somatic BAP1 mutation status (Table 2) and searched for miRNA loci and isomiRs that are differentially abundant between the two groups. While several miRNA arms were found to be differentially abundant between these two groups, many more molecules are found to be differentially abundant when individual isomiRs are examined (FIGS. 3A-3G). Specifically, the expression of the miR-508/514 miRNA cluster from the X chromosome decreases considerably in M3 or BAP mutant patients. Additionally, the miR-508/514 cluster is not located on chromosome 3. IsomiRs from multiple other miRNA loci (e.g. miR-199a/b whose paralogues are located on chromosomes 1, 9, and 19) increase in abundance in M3 and BAP1 mutant patients (FIGS. 3A-3G). isomiRs from several de novo miRNA loci or from novel miRNA loci are also differentially abundant (FIGS. 3A-3G). This further supports the notion that these previously-unreported regulatory molecules are linked mechanistically to UVM.

TABLE 2
Summary of Clinicopathological traits

| Clinicopathological phenotype | Number of samples |
|---|---|
| Sex | Male - 45 |
| | Female - 35 |
| Chromosome 3 copy number | M3 - 37 |
| | D3 - 37 |
| Bap1 Mutation | Bap1 Mutation - 35 |
| | Bap1 WT - 45 |
| EIF1AX/SF3B1 mutations | EIF1AX/SF3B1 mutations - 27 |
| | EIF1AX/SF3B1- WT - 53 |
| Development of metastatic disease | Metastatic disease - 25 |
| | No development of metastatic |
| | disease - 54 |
| Overall prognosis | Alive - 56 |
| | Dead - 24 |
| TCGA SCNA cluster | Cluster 1 - 15 |
| | Cluster 2 - 23 |
| | Cluster 3 - 22 |
| | Cluster 4 - 20 |
| TCGA IncRNA cluster | Cluster 1 - 19 |
| | Cluster 2 - 21 |
| | Cluster 3 - 19 |
| | Cluster 4 - 21 |
| TCGA PARADIGM cluster | Cluster 1 - 14 |
| | Cluster 2 - 22 |
| | Cluster 3 - 14 |
| | Cluster 4 - 21 |
| | Cluster 5 - 5 |
| TCGA miRNA cluster | Cluster 1 - 25 |
| | Cluster 2 - 12 |
| | Cluster 3 - 27 |
| | Cluster 4 - 14 |
| | Cluster 5 - 2 |
| Histology | Epithelioid - 23 |
| | Spindle - 57 |
| AJCC tumor stage | T2a/b - 26 |
| | T3a - 27 |
| | T3b - 10 |
| | T3c/T4 - 7 |

[0086] Stratifying the UVM datasets based on protective SRSF2/SF3B1 or EIF1AX mutations reveals the opposite trend (FIGS. 3A-3G). isomiRs from the miR-508/514 miRNA cluster of chromosome X show increased abundance, whereas isomiRs from miR-199a/b and miR-142 show decreased abundance with mutation status (FIGS. 3A-3G). This is the exact opposite of the pattern observed in M3 or BAP1 mutant patients. The miR-187-3p locus offers another such example: its abundance is increased in patients with an EIF1AX or SRSF2 mutation, and decreased in patients with M3 or BAP1 mutations (FIGS. 3A-3G).

[0087] Notably, isomiRs from the same locus sometimes exhibit differing behaviors and differing associations with outcome. Consequently, it follows that the ‘functionally important’ molecules from the various loci described herein may vary among patients and will depend upon the context. FIG. 5 shows a summary of the number of isomiRs that are found to be differentially abundant in each of the comparisons. Expanding the miRNA loci yields a more complete picture of the molecules that associate to the disease phenotypes than collapsing the loci to a single miRNA arm (FIG. 6). Specifically, in many cases, isomiRs were discovered to be differentially abundant, yet their differences in abundances would therefore be missed when considering the mature locus as a whole. For example, many members of the let 7 family of miRNAs have isomiRs that are differentially abundant (FIGS. 3A-3G) whereas the locus as a whole is not differentially abundant (FIG. 6).

[0088] For completeness, the possibility that isomiRs are differentially abundant with regard to other clinical and demographic attributes was examined, including patient sex, tumor stage according to the AJCC criteria, tumor cell type as identified by histopathology, and somatic copy number analysis (SCNA), lncRNA, and PARADIGM cluster, as identified in the TCGA UVM work. While differentially abundant isomiRs were identified, they tended to be 3′ isomiRs (i.e. they shared miRNA seeds, and, thus, would be expected to have many common mRNA targets) from loci that were described by the UVM TCGA consortium.

### Example 5: Biases in tRF Lengths are Correlated with Clinical Attributes

[0089] Previous studies revealed that, for example, 18 nt tRFs can inhibit reverse transcriptase whereas 22 nt tRFs prevent their translation by blocking tRNA primer binding sites. With this in mind, it was deemed important to determine whether analogous differences exist in UVM. It was found that patients who developed metastases had a significantly higher proportion of 18-nt long tRFs (p-val=0.008) and a lower proportion of 20-nt-long tRFs (p-val=0.002) (FIG. 2D). Similarly, M3 patients showed increased proportions of 18-nt-long tRFs (p-val=0.002) (FIG. 2E). Conversely, EIF1AX mutant patients showed comparatively fewer 18-nt-long tRFs (p-val=0.021) and more 20-nt-long tRFs (p-val=0.003) (FIG. 2F). These observations suggest that tRF fragment lengths correlate with clinical features associated with patient prognosis.

### Example 6: Differential Abundance of tRFs Correlates with Clinical Attributes

[0090] Multiple tRFs were found that are associated with clinical stage, histology, development of metastatic disease, and the miRNA and lncRNA clusters reported in the TCGA UVM analyses (Table 3). Briefly, EIF1AX mutation status, sex, and development of metastasis are all binary classifications. SCNA, PARADIGM, miRNA, and lncRNA cluster designations derive from the original TCGA UVM analysis. Histology refers to the majority cell type comprising the primary tumor: either spindle, or epithelioid. Finally, AJCC staging represents primary tumor staging according to the AJCC tumor classification guidelines, with the T4 classification representing the worst prognosis.

TABLE 3
Summary of differentially abundant tRFs by clinical comparison and tRF type

| | MT | MT | MT | MT | Nuc | Nuc | Nuc | |
|---|---|---|---|---|---|---|---|---|
| | 5′-tRF | i-tRF | 3′-tRF | 5′-tRH | 5′-tRF | i-tRF | 3′-tRF | Total |
| AJCC Clinical | 0 | 0 | 0 | 0 | 1 | 3 | 0 | 4 |
| Stage | | | | | | | | |
| EIF1AX | 0 | 0 | 0 | 0 | 40 | 4 | 2 | 46 |
| Sex | 0 | 0 | 0 | 0 | 9 | 0 | 0 | 9 |
| (Male vs Female) | | | | | | | | |
| Histology | 0 | 0 | 0 | 0 | 30 | 3 | 24 | 57 |
| IncRNA_Cluster | 1 | 1 | 0 | 0 | 0 | 0 | 0 | 2 |
| Metastatic | 1 | 23 | 1 | 1 | 1 | 1 | 0 | 28 |
| Disease | | | | | | | | |
| miRNA Cluster | 1 | 33 | 2 | 0 | 3 | 0 | 0 | 39 |
| PARADIGM | 11 | 133 | 25 | 3 | 6 | 15 | 2 | 195 |
| Cluster | | | | | | | | |
| SCNA Cluster | 7 | 56 | 7 | 0 | 52 | 74 | 3 | 199 |

[0091] The PARADIGM and SCNA cluster stratifications yield the highest number of differentially abundant tRFs. Of note, the majority of these differentially abundant tRFs are i tRFs and arise from MT tRNAs. On the other hand, in SRSF2/SF3B 1 or EIF1AX mutation carriers, the majority of differentially abundant tRFs that are statistically significant are nuclear 5′-tRFs. Several differentially abundant tRFs are differentially abundant across multiple clinical and phenotypical categories (Table 4). For example, SCNA and PARADIGM clusters share several dozen differentially abundant tRFs. Interestingly, 21 tRFs are differentially abundant between “metastatic disease” and “SCNA,” or, between “metastatic disease” and “PARADIGM.” While the functional impact of these two groups of tRFs is not understood, it is reasonable to hypothesize that they may play important regulatory roles in UVM.

TABLE 4
Summary of the overlap of differentially abundant tRFs

| | EIF1AX | Sex | SCNA | IncRNA | Metastatic | Paradigm | miRNA | Histology | AJCC |
|---|---|---|---|---|---|---|---|---|---|
| EIF1AX | 46 | 1 | 27 | 0 | 0 | 2 | 0 | 2 | 0 |
| Sex | 1 | 9 | 1 | 0 | 0 | 0 | 0 | 0 | 0 |
| SCNA | 27 | 1 | 199 | 2 | 5 | 54 | 1 | 2 | 0 |
| IncRNA | 0 | 0 | 2 | 2 | 0 | 2 | 0 | 0 | 0 |
| Metastatic | 0 | 0 | 5 | 0 | 28 | 16 | 0 | 0 | 0 |
| Paradigm | 2 | 0 | 54 | 0 | 16 | 195 | 0 | 0 | 0 |
| miRNA | 0 | 0 | 1 | 0 | 0 | 1 | 39 | 0 | 0 |
| Histology | 2 | 0 | 2 | 0 | 0 | 0 | 0 | 47 | 0 |
| AJCC | 0 | 0 | 0 | 0 | 0 | 0 | 0 | 0 | 4 |

### Example 7: IsomiRs and tRFs Associate with the Development of Metastases

[0092] The link between individual isomiRs or tRFs and the development of metastases was examined next. Kaplan-Meier analyses were performed for time to first metastasis, grouping patients based on the mean RPM of the ncRNA in question (FIG. 4A-4D). IsomiRs such as miR-21-5p|-1|0 (SEQ ID NO:88) and miR-29a-3p|-1|1 (SEQ ID NO:161) appear increased in abundance in patients with metastases (red curves in FIG. 4A-B). In contrast, isomiRs such as miR-199a-3p|1|1 (SEQ ID NO:279) and let-7c-5p|-1|1 (SEQ ID NO:30) are decreased in abundance in patients with metastases (FIG. 4C-4D).

[0093] Lastly, tRFs that may associate with metastasis were examined. Two MT i-tRFs, tRF-22-BP4MJYSZH (SEQ ID NO:1725) from MT tRNA Leu^{TAG} and tRF-21-45DBNIB9B (SEQ ID NO:2921) from MT tRNA Ser^{GCT}, showed significant differences in time to first metastasis when patients were stratified based on the tRFs' respective mean RPM values (FIG. 4E-4F). Naturally, these tRFs and isomiRs are interesting targets for future experimental investigations.

[0094] The recent TCGA analysis of UVM identified four main clinical subcategories associated with patient outcomes. The two categories with poorer prognosis were characterized by M3 status and BAP1 mutations. Patients with these characteristics show increased overall risk of progressing to metastatic disease. Patients with D3 and EIF1AX/SF3B1 mutations have decreased metastatic risk and better disease prognosis. To gain additional insights into the molecular architecture of this disease, TCGA datasets were re-analyzed, specifically focusing on characterizing the profiles and expression of isomiRs and tRFs. These two categories of short ncRNAs have received considerable attention recently, because of their increasingly evident involvement in key regulatory processes.

[0095] The study of the isomiR and tRF profiles described herein reveals a complex regulatory network active in UVM. In several instances, it was found that their expression correlates with distinct clinical outcomes. This exploration of isomiRs and tRFs in this disease has identified many novel features that can be further explored as biomarkers for diagnostic and therapeutic purposes.

[0096] Previous miRNA profiling endeavors in UVM characterized the expression of numerous highly abundant miRNA loci. In addition to corroborating these earlier observations, this work goes significantly further than previous efforts in identifying novel and important features of the UVM miRNA-ome. For example, it has been shown that 72.5% of the 407 miRNA loci that are active in UVM express multiple isomiRs (Table 1, above). In fact, for nearly half of these loci, the most abundant isoform is not the archetype isoform that is listed in miRBase. Moreover, for 21.3% of these loci the archetype isoform listed in miRBase is not even present in the UVM samples. As a result, many of the isoforms that are important for UVM biology have not been studied before, while many of the isoforms that have been studied to date were either not the most relevant ones or absent altogether. These two observations strongly suggest that a very large part of the regulatory layer of UVM (isomiRs and their mRNA targets) has not been studied.

[0097] Adding to this last point, the 5′ termini of ˜30% of all isomiRs that emerged from the present analysis of UVM differ from the 5′ termini of the respective archetypal miRNAs that have been studied to date. Because a shifted 5′ terminus creates a change in the miRNA's seed sequence, the discovery of these isomiRs is of functional consequence. These isomiRs have mRNA targetomes whose contribution to the UVM biology is uncharacterized and differs from what has been studied to date. Indeed, as previously demonstrated in the context of breast cancer, different isomiRs from the same miRNA arm have largely non-overlapping mRNA targetomes.

[0098] The 3p arm of miR-140 (FIG. 1B) offers a characteristic example of the relevance of these studies. Of the 18 isomiRs from this locus that are active in UVM, four are at least as abundant as the archetype and their 5′ terminus differs from that of the archetype. Previous work showed that a 5′-isomiR from miR-140-3p is increased in breast tumors compared to normal breast tissue, wherein it functions to suppress tumor growth and progression. The four highly abundant 5′-isomiRs identified herein share the same seed as the isomiR that was examined in the breast cancer study. Interestingly, these four isomiRs are increased in abundance in patients with EIFA1X or SF3B1 mutations, and decreased in M3 and BAP1 mutation carriers. This suggests that these isomiRs may play tumor-suppressive roles in UVM, just as in breast cancer, an observation that remains to be validated.

[0099] Previous reports provided thousands of novel miRNA loci that are both tissue- and primate-specific. It has been found that many of these previously-reported miRNA loci produce abundant isomiRs in UVM and that their expression correlates with clinical attributes (FIGS. 3A-3G). De novo analyses of the UVM samples uncovered 32 novel miRNA loci. Several of these loci appear to be expressed in a tissue-specific manner. While the functional importance of these newly discovered miRNAs remains to be determined, they nonetheless have potential application as disease-specific biomarkers.

[0100] As shown in FIGS. 3A-3G, multiple loci and isomiRs are differentially abundant across clinical attributes. The miR-508/514 locus stands out. Several of the 15 miRNAs in this cluster have been associated with functions upstream of several pathways involved in tumor development, promotion of melanocyte transformation, and melanoma growth. Furthermore, over-expression of some of these miRNAs in skin melanoma (SKCM) results in decreased cell proliferation and colony formation. Individual miRNAs of this cluster have been associated with cellular phenotypes in other cancers. For example, miR-509-3p has been shown to inhibit cellular migration in ovarian cancer cells. Decreased expression of this miRNA, as seen in UVM, may increase metastatic potential. Similarly, low abundances of miR-508-5p in glioma have been associated with shorter overall survival. Inhibition of miR-508-5p results in increased cell proliferation and cellular migration. Interestingly, this cluster shows the opposite effect in patients with protective SIF1AX and SF3B1 mutations. Therefore, decreased expression here may be indicative of poor prognosis, perhaps arising from promotion of tumor growth. It should be noted that only ˜5% of all of the differentially abundant isomiRs reside on chromosome 3. Since M3 status correlates with poorer overall survival, it is expected that many of the miRNA loci residing on this chromosome would be differentially abundant. At the same time, the large number of differentially abundant isomiRs that are derived from other chromosomes suggests that M3 status makes a relatively small contribution to the spectrum of differentially abundant isomiRs.

[0101] Finally, described herein is the finding that multiple isomiRs are associated with patient survival (FIG. 4A-D). Combined, these collections of isomiRs have a potential application as disease biomarkers that may help determine patient outcomes and/or to decide when to begin new therapeutic interventions.

[0102] It is also worth mentioning here an interesting interplay between the abundances of individual isomiRs from a miRNA arm and the abundance of the arm as a whole. Specifically, multiple instances of isomiRs that are differentially abundant between two groups of patients, but whose corresponding miRNA arm as a whole did not show any change in abundance have been found. This finding highlights the importance of studying miRNA regulation at the isomiR level and its ability to uncover new consequential players, in UVM biology and elsewhere. Doing so is likely to reveal novel disease dependencies that would have otherwise remained hidden from view.

[0103] In addition to exploring the UVM miRNA-ome, the endogenous tRFs have been profiled and analyzed, the results of which are in line with earlier findings that tRF dysregulation is present in other disease types. The analyses described herein show that numerous tRFs are expressed at high levels in UVM. tRFs of nuclear origin are mostly 5′-tRFs, whereas MT tRFs are predominantly 3′-tRFs (FIG. 2A). Additionally, nearly three quarters of the UVM tRFs are produced by ten tRNA isoacceptors: MT ValTAC, MT TyrGTA, Nuc HisGTG, Nuc GluTTC, Nuc ValCAC, Nuc GlyGCC, MT ProTGG, Nuc GluCTC, Nuc AlaCGC, and Nuc GlnCTG (FIG. 2B). Considering the tRF studies in other contexts, this particular tRNA isoacceptor bias is unique to UVM. It is conceivable that the corresponding tRFs are particularly important for key regulatory pathways in UVM and further work is required to determine the full functional consequences of this observation.

[0104] The present analysis also revealed a length bias in the production of tRFs (FIG. 2). MT-derived tRFs exhibit a unimodal distribution with a peak at 20 nts (FIG. 2C). Nuclear tRFs on the other hand exhibit a bimodal distribution with peaks at 20 and 23 nts (FIG. 2C). This length bias suggests that distinct processes produce tRFs from the MT and nuclear tRNAs. Recall here that the sequencing protocol employed by the TCGA likely prevents observation of tRFs longer than 30nt.

[0105] Patients who developed metastases have a significantly higher percentage of tRFs of length 18 nts and a significantly lower percentage of tRFs of length 20 nts (FIGS. 2C-2D). Similarly, M3 patients show an increased percentage of 18-nt-long tRFs. Conversely, patients with protective EIF1AX mutations show a decrease in 18-nt-long tRFs and an increase in 20-nt-long tRFs. The mechanisms responsible for these cleavage patterns are not known. Previous work described a mechanism whereby 18-nt-long fragments block reverse transcription whereas longer tRFs (22 nts) prime RNAi mediated degradation. Thus, the strong association between tRF length and clinical characteristics warrants determination of the functional roles of these tRFs in UVM.

[0106] Lastly, a large number of differentially abundant tRFs were identified across clinical categories (Table 3). tRF profiles differ across the formerly-established somatic copy number analysis (SCNA) and mRNA paradigm cluster (PARADIGM) analysis described by the TCGA Consortium. Additionally, tRFs were found to be differentially abundant in the context of EIF1AX mutations, metastatic disease, and when considering the majority cell type of the underlying tumor. The vast majority of tRFs are differentially abundant in one category, but a number are shared across categories. tRF abundance also associates with overall patient survival (FIG. 4E-4F). This evidence points toward differential activity of tRFs in each of these contexts. Unique tRFs may play a role in regulation of pro-metastatic pathways, whereas others may be active in the control and differentiation of uveal cells.

[0107] Taken together, these findings delineate complex relationships among the isomiRs and tRFs that are present in primary UVM. The present disclosure provides many novel features that can be potentially leveraged to build novel diagnostic, prognostic, or therapeutic applications. While much additional work is needed to elucidate the roles of these molecules, the generated insights represent a first step towards making new inroads into improving patient outcomes in UVM.

[0108] The terms and expressions employed herein are used as terms of description and not of limitation, and there is no intention in the use of such terms and expressions of excluding any equivalents of the features shown and described or portions thereof, but it is recognized that various modifications are possible within the scope of the embodiments of the present application. Thus, it should be understood that although the present application describes specific embodiments and optional features, modification and variation of the compositions, methods, and concepts herein disclosed may be resorted to by those of ordinary skill in the art, and that such modifications and variations are considered to be within the scope of embodiments of the present application.

### Enumerated Embodiments

[0109] The following exemplary embodiments are provided, the numbering of which is not to be construed as designating levels of importance:

[0110] Embodiment 1 provides a method for assessing whether a uveal melanoma (UVM) patient has, or is at risk of developing a condition, the method comprising:
[0111] (a) measuring in a biological sample obtained from the patient the abundance of at least one of:
   [0112] (i) at least two isoforms (isomiRs) of at least one miRNA; and
   [0113] (ii) at least one tRNA derived fragment (tRF);
[0114] (b) computing a difference in the abundance of at least one of:
   [0115] (i) the at least two isomiRs of at least one miRNA; and
   [0116] (ii) the at least one tRF;
[0117] in the biological sample as compared to the abundance of the same molecules in a reference sample,
   [0118] wherein the difference that results from the computing is an indication that the subject either has, or is at risk of developing, or is at a given stage of the condition.

[0119] Embodiment 2 provides the method of Embodiment 1, wherein the condition is metastasis.

[0120] Embodiment 3 provides the method of any of Embodiments 1-2, wherein each isomiR of the at least two isomiRs is encoded by a sequence selected from the group consisting of SEQ ID NOs:1-1677.

[0121] Embodiment 4 provides the method of any of Embodiments 1-3, wherein each tRF of the at least one tRF is encoded by a sequence selected from the group consisting of SEQ ID NOs:1678-5511.

[0122] Embodiment 5 provides the method of any of Embodiments 1-4, wherein the abundance of both the at least two isomiRs and the at least one tRF are measured in the biological sample.

[0123] Embodiment 6 provides the method of any of Embodiments 1-5, wherein if the abundance of the at least two isomiRs in the biological sample differ from the abundance of the same molecules in the reference sample, the patient is determined as having, being at risk of developing, or being at a given stage of the condition.

[0124] Embodiment 7 provides the method of any of Embodiments 1-6, wherein the abundance of the at least two isomiRs in the biological sample are greater than the abundance of the same molecules in the reference sample.

[0125] Embodiment 8 provides the method of any of Embodiments 1-7, wherein at least one of the at least two isomiRs is encoded by a sequence selected from the group consisting of SEQ ID NO:88 and SEQ ID NO:161.

[0126] Embodiment 9 provides the method of any of Embodiments 1-8, wherein the abundance of the at least two isomiRs in the biological sample are less than the abundance of the same molecules in the reference sample.

[0127] Embodiment 10 provides the method of any of Embodiments 1-9, wherein at least one of the at least two isomiRs is encoded by a sequence selected from the group consisting of SEQ ID NO:279 and SEQ ID NO:30.

[0128] Embodiment 11 provides the method of any of Embodiments 1-10, wherein if the abundance of the at least one tRF in the biological sample differ from the abundance of the same molecules in the reference sample, the patient is determined as having, being at risk of developing, or being at a given stage of the condition.

[0129] Embodiment 12 provides the method of any of Embodiments 1-11, wherein if the abundance of both of the at least two isomiRs and the at least one tRF in the biological sample differ from the abundance of the same molecules in the reference sample, the patient is determined as having, being at risk of developing, or being at a given stage of the condition.

[0130] Embodiment 13 provides the method of any of Embodiments 1-12, wherein the difference comprises a ratio of the abundance of the at least two isomiRs in the biological sample and the abundance of the same molecules in the reference sample, wherein the ratio has a log 2 value with an absolute value greater than or equal to 1.

[0131] Embodiment 14 provides the method of any of Embodiments 1-13, wherein the difference comprises a ratio of the abundance of the at least one tRF in the biological sample and the abundance of the same molecules in the reference sample, wherein the ratio has a log 2 value with an absolute value greater than or equal to 1.

[0132] Embodiment 15 provides the method of any of Embodiments 1-14, wherein the measuring comprises subjecting the biological sample to deep sequencing.

[0133] Embodiment 16 provides the method of any of Embodiments 1-15, wherein the measuring comprises subjecting the biological sample to a polymerase chain reaction (PCR).

[0134] Embodiment 17 provides the method of any of Embodiments 1-16, wherein the PCR can ensure the identity of the endpoints of the molecule being measured.

[0135] Embodiment 18 provides the method of any of Embodiments 1-17, wherein the PCR comprises a modified quantitative reverse transcription PCR (qRT-PCR).

[0136] Embodiment 19 provides the method of any of Embodiments 1-18, further comprising recommending a therapeutic regimen.

[0137] The disclosures of each and every patent, patent application, and publication cited herein are hereby incorporated herein by reference in their entirety. While this disclosure has been disclosed with reference to specific embodiments, it is apparent that other embodiments and variations of this disclosure may be devised by others skilled in the art without departing from the true spirit and scope of the disclosure. The appended claims are intended to be construed to include all such embodiments and equivalent variations.

What is claimed is:

1. A method for assessing whether a uveal melanoma (UVM) patient has, or is at risk of developing a condition, the method comprising:
(a) measuring in a biological sample obtained from the patient the abundance of at least one of:
(i) at least two isoforms (isomiRs) of at least one miRNA; and
(ii) at least one tRNA derived fragment (tRF);
(b) computing a difference in the abundance of at least one of:
(i) the at least two isomiRs of at least one miRNA; and
(ii) the at least one tRF;
in the biological sample as compared to the abundance of the same molecules in a reference sample,
wherein the difference that results from the computing is an indication that the subject either has, or is at risk of developing, or is at a given stage of the condition.

2. The method of claim 1, wherein the condition is metastasis.

3. The method of claim 1, wherein each isomiR of the at least two isomiRs is encoded by a sequence selected from the group consisting of SEQ ID NOs:1-1677.

4. The method of claim 1, wherein each tRF of the at least one tRF is encoded by a sequence selected from the group consisting of SEQ ID NOs:1678-5511.

5. The method of claim 1, wherein the abundance of both the at least two isomiRs and the at least one tRF are measured in the biological sample.

6. The method of claim 1, wherein if the abundance of the at least two isomiRs in the biological sample differ from the abundance of the same molecules in the reference sample, the patient is determined as having, being at risk of developing, or being at a given stage of the condition.

7. The method of claim 6, wherein the abundance of the at least two isomiRs in the biological sample are greater than the abundance of the same molecules in the reference sample.

8. The method of claim 7, wherein at least one of the at least two isomiRs is encoded by a sequence selected from the group consisting of SEQ ID NO:88 and SEQ ID NO:161.

9. The method of claim 6, wherein the abundance of the at least two isomiRs in the biological sample are less than the abundance of the same molecules in the reference sample.

10. The method of claim 9, wherein at least one of the at least two isomiRs is encoded by a sequence selected from the group consisting of SEQ ID NO:279 and SEQ ID NO:30.

11. The method of claim 1, wherein if the abundance of the at least one tRF in the biological sample differ from the abundance of the same molecules in the reference sample, the patient is determined as having, being at risk of developing, or being at a given stage of the condition.

12. The method of claim 1, wherein if the abundance of both of the at least two isomiRs and the at least one tRF in the biological sample differ from the abundance of the same molecules in the reference sample, the patient is determined as having, being at risk of developing, or being at a given stage of the condition.

13. The method of claim 1, wherein the difference comprises a ratio of the abundance of the at least two isomiRs in the biological sample and the abundance of the same molecules in the reference sample, wherein the ratio has a log 2 value with an absolute value greater than or equal to 1.

14. The method of claim 1, wherein the difference comprises a ratio of the abundance of the at least one tRF in the biological sample and the abundance of the same molecules in the reference sample, wherein the ratio has a log 2 value with an absolute value greater than or equal to 1.

15. The method of claim 1, wherein the measuring comprises subjecting the biological sample to deep sequencing.

16. The method of claim 1, wherein the measuring comprises subjecting the biological sample to a polymerase chain reaction (PCR).

17. The method of claim 16, wherein the PCR can ensure the identity of the endpoints of the molecule being measured.

18. The method of claim 16, wherein the PCR comprises a modified quantitative reverse transcription PCR (qRT-PCR).

19. The method of claim 1, further comprising recommending a therapeutic regimen.

The application's sequence listing, which the Patent Office published only in electronic form, follows.

SEQUENCE LISTING (5511 sequences)

SEQ ID NO: 1 - DNA, 24 bp, homo sapiens
  let-7a-5p|0|2
tgaggtagtaggttgtatagttta

SEQ ID NO: 2 - DNA, 22 bp, homo sapiens
  let-7b-5p|0|0
tgaggtagtaggttgtgtggtt

SEQ ID NO: 3 - DNA, 21 bp, homo sapiens
  let-7b-5p|0|-1
tgaggtagtaggttgtgtggt

SEQ ID NO: 4 - DNA, 23 bp, homo sapiens
  let-7b-5p|0|1
tgaggtagtaggttgtgtggttt

SEQ ID NO: 5 - DNA, 20 bp, homo sapiens
  let-7b-5p|0|-2
tgaggtagtaggttgtgtgg

SEQ ID NO: 6 - DNA, 24 bp, homo sapiens
  let-7b-5p|0|2
tgaggtagtaggttgtgtggtttc

SEQ ID NO: 7 - DNA, 19 bp, homo sapiens
  let-7b-5p|0|-3
tgaggtagtaggttgtgtg

SEQ ID NO: 8 - DNA, 25 bp, homo sapiens
  let-7b-5p|0|3
tgaggtagtaggttgtgtggtttca

SEQ ID NO: 9 - DNA, 18 bp, homo sapiens
  let-7b-5p|0|-4
tgaggtagtaggttgtgt

SEQ ID NO: 10 - DNA, 26 bp, homo sapiens
  let-7b-5p|0|4
tgaggtagtaggttgtgtggtttcag

SEQ ID NO: 11 - DNA, 17 bp, homo sapiens
  let-7b-5p|0|-5
tgaggtagtaggttgtg

SEQ ID NO: 12 - DNA, 28 bp, homo sapiens
  let-7b-5p|0|6
tgaggtagtaggttgtgtggtttcaggg

SEQ ID NO: 13 - DNA, 23 bp, homo sapiens
  let-7b-5p|-1|0
gtgaggtagtaggttgtgtggtt

SEQ ID NO: 14 - DNA, 21 bp, homo sapiens
  let-7b-5p|1|0
gaggtagtaggttgtgtggtt

SEQ ID NO: 15 - DNA, 22 bp, homo sapiens
  let-7b-5p|1|1
gaggtagtaggttgtgtggttt

SEQ ID NO: 16 - DNA, 21 bp, homo sapiens
  let-7b-5p|-1|-2
gtgaggtagtaggttgtgtgg

SEQ ID NO: 17 - DNA, 19 bp, homo sapiens
  let-7b-5p|1|-2
gaggtagtaggttgtgtgg

SEQ ID NO: 18 - DNA, 20 bp, homo sapiens
  let-7b-5p|3|1
ggtagtaggttgtgtggttt

SEQ ID NO: 19 - DNA, 22 bp, homo sapiens
  let-7c-5p|0|0
tgaggtagtaggttgtatggtt

SEQ ID NO: 20 - DNA, 21 bp, homo sapiens
  let-7c-5p|0|-1
tgaggtagtaggttgtatggt

SEQ ID NO: 21 - DNA, 23 bp, homo sapiens
  let-7c-5p|0|1
tgaggtagtaggttgtatggttt

SEQ ID NO: 22 - DNA, 20 bp, homo sapiens
  let-7c-5p|0|-2
tgaggtagtaggttgtatgg

SEQ ID NO: 23 - DNA, 24 bp, homo sapiens
  let-7c-5p|0|2
tgaggtagtaggttgtatggttta

SEQ ID NO: 24 - DNA, 19 bp, homo sapiens
  let-7c-5p|0|-3
tgaggtagtaggttgtatg

SEQ ID NO: 25 - DNA, 25 bp, homo sapiens
  let-7c-5p|0|3
tgaggtagtaggttgtatggtttag

SEQ ID NO: 26 - DNA, 26 bp, homo sapiens
  let-7c-5p|0|4
tgaggtagtaggttgtatggtttaga

SEQ ID NO: 27 - DNA, 23 bp, homo sapiens
  let-7c-5p|-1|0
ttgaggtagtaggttgtatggtt

SEQ ID NO: 28 - DNA, 21 bp, homo sapiens
  let-7c-5p|1|0
gaggtagtaggttgtatggtt

SEQ ID NO: 29 - DNA, 22 bp, homo sapiens
  let-7c-5p|-1|-1
ttgaggtagtaggttgtatggt

SEQ ID NO: 30 - DNA, 24 bp, homo sapiens
  let-7c-5p|-1|1
ttgaggtagtaggttgtatggttt

SEQ ID NO: 31 - DNA, 21 bp, homo sapiens
  let-7c-5p|-1|-2
ttgaggtagtaggttgtatgg

SEQ ID NO: 32 - DNA, 20 bp, homo sapiens
  let-7c-5p|-1|-3
ttgaggtagtaggttgtatg

SEQ ID NO: 33 - DNA, 23 bp, homo sapiens
  let-7c-5p|-2|-1
gttgaggtagtaggttgtatggt

SEQ ID NO: 34 - DNA, 22 bp, homo sapiens
  let-7c-5p|-2|-2
gttgaggtagtaggttgtatgg

SEQ ID NO: 35 - DNA, 22 bp, homo sapiens
  let-7d-5p|0|0
agaggtagtaggttgcatagtt

SEQ ID NO: 36 - DNA, 21 bp, homo sapiens
  let-7d-5p|0|-1
agaggtagtaggttgcatagt

SEQ ID NO: 37 - DNA, 23 bp, homo sapiens
  let-7d-5p|0|1
agaggtagtaggttgcatagttt

SEQ ID NO: 38 - DNA, 20 bp, homo sapiens
  let-7d-5p|0|-2
agaggtagtaggttgcatag

SEQ ID NO: 39 - DNA, 24 bp, homo sapiens
  let-7d-5p|0|2
agaggtagtaggttgcatagtttt

SEQ ID NO: 40 - DNA, 21 bp, homo sapiens
  let-7d-5p|1|0
gaggtagtaggttgcatagtt

SEQ ID NO: 41 - DNA, 22 bp, homo sapiens
  let-7e-5p|0|0
tgaggtaggaggttgtatagtt

SEQ ID NO: 42 - DNA, 21 bp, homo sapiens
  let-7e-5p|0|-1
tgaggtaggaggttgtatagt

SEQ ID NO: 43 - DNA, 23 bp, homo sapiens
  let-7e-5p|0|1
tgaggtaggaggttgtatagttg

SEQ ID NO: 44 - DNA, 20 bp, homo sapiens
  let-7e-5p|0|-2
tgaggtaggaggttgtatag

SEQ ID NO: 45 - DNA, 24 bp, homo sapiens
  let-7e-5p|0|2
tgaggtaggaggttgtatagttga

SEQ ID NO: 46 - DNA, 19 bp, homo sapiens
  let-7e-5p|0|-3
tgaggtaggaggttgtata

SEQ ID NO: 47 - DNA, 18 bp, homo sapiens
  let-7e-5p|0|-4
tgaggtaggaggttgtat

SEQ ID NO: 48 - DNA, 23 bp, homo sapiens
  let-7f-5p|0|1
tgaggtagtagattgtatagttg

SEQ ID NO: 49 - DNA, 24 bp, homo sapiens
  let-7f-5p|0|2
tgaggtagtagattgtatagttgt

SEQ ID NO: 50 - DNA, 26 bp, homo sapiens
  let-7f-5p|0|4
tgaggtagtagattgtatagttgtgg

SEQ ID NO: 51 - DNA, 22 bp, homo sapiens
  miR-15a-5p|0|0
tagcagcacataatggtttgtg

SEQ ID NO: 52 - DNA, 21 bp, homo sapiens
  miR-15a-5p|0|-1
tagcagcacataatggtttgt

SEQ ID NO: 53 - DNA, 23 bp, homo sapiens
  miR-15a-5p|0|1
tagcagcacataatggtttgtgg

SEQ ID NO: 54 - DNA, 24 bp, homo sapiens
  miR-15a-5p|0|2
tagcagcacataatggtttgtgga

SEQ ID NO: 55 - DNA, 24 bp, homo sapiens
  miR-16-5p|0|2
tagcagcacgtaaatattggcgtt

SEQ ID NO: 56 - DNA, 23 bp, homo sapiens
  miR-17-5p|0|0
caaagtgcttacagtgcaggtag

SEQ ID NO: 57 - DNA, 22 bp, homo sapiens
  miR-17-5p|0|-1
caaagtgcttacagtgcaggta

SEQ ID NO: 58 - DNA, 24 bp, homo sapiens
  miR-17-5p|0|1
caaagtgcttacagtgcaggtagt

SEQ ID NO: 59 - DNA, 21 bp, homo sapiens
  miR-17-5p|0|-2
caaagtgcttacagtgcaggt

SEQ ID NO: 60 - DNA, 20 bp, homo sapiens
  miR-17-5p|0|-3
caaagtgcttacagtgcagg

SEQ ID NO: 61 - DNA, 24 bp, homo sapiens
  miR-17-5p|-1|0
tcaaagtgcttacagtgcaggtag

SEQ ID NO: 62 - DNA, 23 bp, homo sapiens
  miR-17-5p|-1|-1
tcaaagtgcttacagtgcaggta

SEQ ID NO: 63 - DNA, 22 bp, homo sapiens
  miR-17-5p|-1|-2
tcaaagtgcttacagtgcaggt

SEQ ID NO: 64 - DNA, 22 bp, homo sapiens
  miR-17-3p|0|0
actgcagtgaaggcacttgtag

SEQ ID NO: 65 - DNA, 23 bp, homo sapiens
  miR-17-3p|0|1
actgcagtgaaggcacttgtagc

SEQ ID NO: 66 - DNA, 24 bp, homo sapiens
  miR-17-3p|0|2
actgcagtgaaggcacttgtagca

SEQ ID NO: 67 - DNA, 23 bp, homo sapiens
  miR-17-3p|-1|0
tactgcagtgaaggcacttgtag

SEQ ID NO: 68 - DNA, 21 bp, homo sapiens
  miR-17-3p|1|0
ctgcagtgaaggcacttgtag

SEQ ID NO: 69 - DNA, 22 bp, homo sapiens
  miR-17-3p|1|1
ctgcagtgaaggcacttgtagc

SEQ ID NO: 70 - DNA, 23 bp, homo sapiens
  miR-18a-5p|0|0
taaggtgcatctagtgcagatag

SEQ ID NO: 71 - DNA, 23 bp, homo sapiens
  miR-19a-3p|0|0
tgtgcaaatctatgcaaaactga

SEQ ID NO: 72 - DNA, 22 bp, homo sapiens
  miR-19a-3p|0|-1
tgtgcaaatctatgcaaaactg

SEQ ID NO: 73 - DNA, 23 bp, homo sapiens
  miR-20a-5p|0|0
taaagtgcttatagtgcaggtag

SEQ ID NO: 74 - DNA, 22 bp, homo sapiens
  miR-20a-5p|0|-1
taaagtgcttatagtgcaggta

SEQ ID NO: 75 - DNA, 24 bp, homo sapiens
  miR-20a-5p|0|1
taaagtgcttatagtgcaggtagt

SEQ ID NO: 76 - DNA, 21 bp, homo sapiens
  miR-20a-5p|0|-2
taaagtgcttatagtgcaggt

SEQ ID NO: 77 - DNA, 22 bp, homo sapiens
  miR-21-5p|0|0
tagcttatcagactgatgttga

SEQ ID NO: 78 - DNA, 21 bp, homo sapiens
  miR-21-5p|0|-1
tagcttatcagactgatgttg

SEQ ID NO: 79 - DNA, 23 bp, homo sapiens
  miR-21-5p|0|1
tagcttatcagactgatgttgac

SEQ ID NO: 80 - DNA, 20 bp, homo sapiens
  miR-21-5p|0|-2
tagcttatcagactgatgtt

SEQ ID NO: 81 - DNA, 24 bp, homo sapiens
  miR-21-5p|0|2
tagcttatcagactgatgttgact

SEQ ID NO: 82 - DNA, 19 bp, homo sapiens
  miR-21-5p|0|-3
tagcttatcagactgatgt

SEQ ID NO: 83 - DNA, 25 bp, homo sapiens
  miR-21-5p|0|3
tagcttatcagactgatgttgactg

SEQ ID NO: 84 - DNA, 18 bp, homo sapiens
  miR-21-5p|0|-4
tagcttatcagactgatg

SEQ ID NO: 85 - DNA, 26 bp, homo sapiens
  miR-21-5p|0|4
tagcttatcagactgatgttgactgt

SEQ ID NO: 86 - DNA, 27 bp, homo sapiens
  miR-21-5p|0|5
tagcttatcagactgatgttgactgtt

SEQ ID NO: 87 - DNA, 29 bp, homo sapiens
  miR-21-5p|0|7
tagcttatcagactgatgttgactgttga

SEQ ID NO: 88 - DNA, 23 bp, homo sapiens
  miR-21-5p|-1|0
gtagcttatcagactgatgttga

SEQ ID NO: 89 - DNA, 21 bp, homo sapiens
  miR-21-5p|1|0
agcttatcagactgatgttga

SEQ ID NO: 90 - DNA, 22 bp, homo sapiens
  miR-21-5p|-1|-1
gtagcttatcagactgatgttg

SEQ ID NO: 91 - DNA, 24 bp, homo sapiens
  miR-21-5p|-1|1
gtagcttatcagactgatgttgac

SEQ ID NO: 92 - DNA, 22 bp, homo sapiens
  miR-21-5p|1|1
agcttatcagactgatgttgac

SEQ ID NO: 93 - DNA, 23 bp, homo sapiens
  miR-21-5p|1|2
agcttatcagactgatgttgact

SEQ ID NO: 94 - DNA, 18 bp, homo sapiens
  miR-21-5p|4|0
ttatcagactgatgttga

SEQ ID NO: 95 - DNA, 22 bp, homo sapiens
  miR-22-3p|0|0
aagctgccagttgaagaactgt

SEQ ID NO: 96 - DNA, 21 bp, homo sapiens
  miR-22-3p|0|-1
aagctgccagttgaagaactg

SEQ ID NO: 97 - DNA, 23 bp, homo sapiens
  miR-22-3p|0|1
aagctgccagttgaagaactgtt

SEQ ID NO: 98 - DNA, 20 bp, homo sapiens
  miR-22-3p|0|-2
aagctgccagttgaagaact

SEQ ID NO: 99 - DNA, 24 bp, homo sapiens
  miR-22-3p|0|2
aagctgccagttgaagaactgttg

SEQ ID NO: 100 - DNA, 19 bp, homo sapiens
  miR-22-3p|0|-3
aagctgccagttgaagaac

SEQ ID NO: 101 - DNA, 18 bp, homo sapiens
  miR-22-3p|0|-4
aagctgccagttgaagaa

SEQ ID NO: 102 - DNA, 23 bp, homo sapiens
  miR-22-3p|-1|0
aaagctgccagttgaagaactgt

SEQ ID NO: 103 - DNA, 21 bp, homo sapiens
  miR-22-3p|1|0
agctgccagttgaagaactgt

SEQ ID NO: 104 - DNA, 20 bp, homo sapiens
  miR-22-3p|1|-1
agctgccagttgaagaactg

SEQ ID NO: 105 - DNA, 22 bp, homo sapiens
  miR-22-3p|1|1
agctgccagttgaagaactgtt

SEQ ID NO: 106 - DNA, 23 bp, homo sapiens
  miR-22-3p|1|2
agctgccagttgaagaactgttg

SEQ ID NO: 107 - DNA, 20 bp, homo sapiens
  miR-22-3p|2|0
gctgccagttgaagaactgt

SEQ ID NO: 108 - DNA, 19 bp, homo sapiens
  miR-22-3p|3|0
ctgccagttgaagaactgt

SEQ ID NO: 109 - DNA, 21 bp, homo sapiens
  miR-23a-3p|0|0
atcacattgccagggatttcc

SEQ ID NO: 110 - DNA, 20 bp, homo sapiens
  miR-23a-3p|0|-1
atcacattgccagggatttc

SEQ ID NO: 111 - DNA, 22 bp, homo sapiens
  miR-23a-3p|0|1
atcacattgccagggatttcca

SEQ ID NO: 112 - DNA, 19 bp, homo sapiens
  miR-23a-3p|0|-2
atcacattgccagggattt

SEQ ID NO: 113 - DNA, 23 bp, homo sapiens
  miR-23a-3p|0|2
atcacattgccagggatttccaa

SEQ ID NO: 114 - DNA, 18 bp, homo sapiens
  miR-23a-3p|0|-3
atcacattgccagggatt

SEQ ID NO: 115 - DNA, 24 bp, homo sapiens
  miR-23a-3p|0|3
atcacattgccagggatttccaac

SEQ ID NO: 116 - DNA, 25 bp, homo sapiens
  miR-23a-3p|0|4
atcacattgccagggatttccaacc

SEQ ID NO: 117 - DNA, 22 bp, homo sapiens
  miR-23a-3p|-1|0
aatcacattgccagggatttcc

SEQ ID NO: 118 - DNA, 20 bp, homo sapiens
  miR-23a-3p|1|0
tcacattgccagggatttcc

SEQ ID NO: 119 - DNA, 21 bp, homo sapiens
  miR-23a-3p|-1|-1
aatcacattgccagggatttc

SEQ ID NO: 120 - DNA, 23 bp, homo sapiens
  miR-23a-3p|-1|1
aatcacattgccagggatttcca

SEQ ID NO: 121 - DNA, 19 bp, homo sapiens
  miR-23a-3p|1|-1
tcacattgccagggatttc

SEQ ID NO: 122 - DNA, 21 bp, homo sapiens
  miR-23a-3p|1|1
tcacattgccagggatttcca

SEQ ID NO: 123 - DNA, 24 bp, homo sapiens
  miR-23a-3p|-1|2
aatcacattgccagggatttccaa

SEQ ID NO: 124 - DNA, 22 bp, homo sapiens
  miR-23a-3p|1|2
tcacattgccagggatttccaa

SEQ ID NO: 125 - DNA, 23 bp, homo sapiens
  miR-23a-3p|1|3
tcacattgccagggatttccaac

SEQ ID NO: 126 - DNA, 24 bp, homo sapiens
  miR-23a-3p|1|4
tcacattgccagggatttccaacc

SEQ ID NO: 127 - DNA, 21 bp, homo sapiens
  miR-24-3p|0|-1
tggctcagttcagcaggaaca

SEQ ID NO: 128 - DNA, 22 bp, homo sapiens
  miR-25-3p|0|0
cattgcacttgtctcggtctga

SEQ ID NO: 129 - DNA, 21 bp, homo sapiens
  miR-25-3p|0|-1
cattgcacttgtctcggtctg

SEQ ID NO: 130 - DNA, 23 bp, homo sapiens
  miR-25-3p|0|1
cattgcacttgtctcggtctgac

SEQ ID NO: 131 - DNA, 20 bp, homo sapiens
  miR-25-3p|0|-2
cattgcacttgtctcggtct

SEQ ID NO: 132 - DNA, 24 bp, homo sapiens
  miR-25-3p|0|2
cattgcacttgtctcggtctgaca

SEQ ID NO: 133 - DNA, 19 bp, homo sapiens
  miR-25-3p|0|-3
cattgcacttgtctcggtc

SEQ ID NO: 134 - DNA, 23 bp, homo sapiens
  miR-25-3p|-1|0
gcattgcacttgtctcggtctga

SEQ ID NO: 135 - DNA, 21 bp, homo sapiens
  miR-25-3p|1|0
attgcacttgtctcggtctga

SEQ ID NO: 136 - DNA, 20 bp, homo sapiens
  miR-25-3p|2|0
ttgcacttgtctcggtctga

SEQ ID NO: 137 - DNA, 25 bp, homo sapiens
  miR-26a-5p|0|3
ttcaagtaatccaggataggctgtt

SEQ ID NO: 138 - DNA, 26 bp, homo sapiens
  miR-26a-5p|0|4
ttcaagtaatccaggataggctgttt

SEQ ID NO: 139 - DNA, 21 bp, homo sapiens
  miR-26b-5p|0|0
ttcaagtaattcaggataggt

SEQ ID NO: 140 - DNA, 20 bp, homo sapiens
  miR-26b-5p|0|-1
ttcaagtaattcaggatagg

SEQ ID NO: 141 - DNA, 22 bp, homo sapiens
  miR-26b-5p|0|1
ttcaagtaattcaggataggtt

SEQ ID NO: 142 - DNA, 19 bp, homo sapiens
  miR-26b-5p|0|-2
ttcaagtaattcaggatag

SEQ ID NO: 143 - DNA, 23 bp, homo sapiens
  miR-26b-5p|0|2
ttcaagtaattcaggataggttg

SEQ ID NO: 144 - DNA, 24 bp, homo sapiens
  miR-26b-5p|0|3
ttcaagtaattcaggataggttgt

SEQ ID NO: 145 - DNA, 21 bp, homo sapiens
  miR-27a-3p|0|0
ttcacagtggctaagttccgc

SEQ ID NO: 146 - DNA, 20 bp, homo sapiens
  miR-27a-3p|0|-1
ttcacagtggctaagttccg

SEQ ID NO: 147 - DNA, 22 bp, homo sapiens
  miR-27a-3p|0|1
ttcacagtggctaagttccgcc

SEQ ID NO: 148 - DNA, 19 bp, homo sapiens
  miR-27a-3p|0|-2
ttcacagtggctaagttcc

SEQ ID NO: 149 - DNA, 22 bp, homo sapiens
  miR-28-5p|0|0
aaggagctcacagtctattgag

SEQ ID NO: 150 - DNA, 21 bp, homo sapiens
  miR-28-5p|0|-1
aaggagctcacagtctattga

SEQ ID NO: 151 - DNA, 23 bp, homo sapiens
  miR-28-5p|0|1
aaggagctcacagtctattgagt

SEQ ID NO: 152 - DNA, 22 bp, homo sapiens
  miR-29a-3p|0|0
tagcaccatctgaaatcggtta

SEQ ID NO: 153 - DNA, 21 bp, homo sapiens
  miR-29a-3p|0|-1
tagcaccatctgaaatcggtt

SEQ ID NO: 154 - DNA, 23 bp, homo sapiens
  miR-29a-3p|0|1
tagcaccatctgaaatcggttat

SEQ ID NO: 155 - DNA, 20 bp, homo sapiens
  miR-29a-3p|0|-2
tagcaccatctgaaatcggt

SEQ ID NO: 156 - DNA, 24 bp, homo sapiens
  miR-29a-3p|0|2
tagcaccatctgaaatcggttata

SEQ ID NO: 157 - DNA, 19 bp, homo sapiens
  miR-29a-3p|0|-3
tagcaccatctgaaatcgg

SEQ ID NO: 158 - DNA, 18 bp, homo sapiens
  miR-29a-3p|0|-4
tagcaccatctgaaatcg

SEQ ID NO: 159 - DNA, 23 bp, homo sapiens
  miR-29a-3p|-1|0
ctagcaccatctgaaatcggtta

SEQ ID NO: 160 - DNA, 22 bp, homo sapiens
  miR-29a-3p|-1|-1
ctagcaccatctgaaatcggtt

SEQ ID NO: 161 - DNA, 24 bp, homo sapiens
  miR-29a-3p|-1|1
ctagcaccatctgaaatcggttat

SEQ ID NO: 162 - DNA, 21 bp, homo sapiens
  miR-29a-3p|-1|-2
ctagcaccatctgaaatcggt

SEQ ID NO: 163 - DNA, 20 bp, homo sapiens
  miR-29a-3p|-1|-3
ctagcaccatctgaaatcgg

SEQ ID NO: 164 - DNA, 19 bp, homo sapiens
  miR-29a-3p|-1|-4
ctagcaccatctgaaatcg

SEQ ID NO: 165 - DNA, 18 bp, homo sapiens
  miR-29a-3p|-1|-5
ctagcaccatctgaaatc

SEQ ID NO: 166 - DNA, 22 bp, homo sapiens
  miR-30a-5p|0|0
tgtaaacatcctcgactggaag

SEQ ID NO: 167 - DNA, 21 bp, homo sapiens
  miR-30a-5p|0|-1
tgtaaacatcctcgactggaa

SEQ ID NO: 168 - DNA, 23 bp, homo sapiens
  miR-30a-5p|0|1
tgtaaacatcctcgactggaagc

SEQ ID NO: 169 - DNA, 20 bp, homo sapiens
  miR-30a-5p|0|-2
tgtaaacatcctcgactgga

SEQ ID NO: 170 - DNA, 24 bp, homo sapiens
  miR-30a-5p|0|2
tgtaaacatcctcgactggaagct

SEQ ID NO: 171 - DNA, 19 bp, homo sapiens
  miR-30a-5p|0|-3
tgtaaacatcctcgactgg

SEQ ID NO: 172 - DNA, 25 bp, homo sapiens
  miR-30a-5p|0|3
tgtaaacatcctcgactggaagctg

SEQ ID NO: 173 - DNA, 26 bp, homo sapiens
  miR-30a-5p|0|4
tgtaaacatcctcgactggaagctgt

SEQ ID NO: 174 - DNA, 23 bp, homo sapiens
  miR-30a-5p|-1|0
ctgtaaacatcctcgactggaag

SEQ ID NO: 175 - DNA, 21 bp, homo sapiens
  miR-30a-5p|1|0
gtaaacatcctcgactggaag

SEQ ID NO: 176 - DNA, 22 bp, homo sapiens
  miR-30a-5p|1|1
gtaaacatcctcgactggaagc

SEQ ID NO: 177 - DNA, 23 bp, homo sapiens
  miR-30a-5p|1|2
gtaaacatcctcgactggaagct

SEQ ID NO: 178 - DNA, 24 bp, homo sapiens
  miR-30a-5p|1|3
gtaaacatcctcgactggaagctg

SEQ ID NO: 179 - DNA, 22 bp, homo sapiens
  miR-30a-3p|0|0
ctttcagtcggatgtttgcagc

SEQ ID NO: 180 - DNA, 21 bp, homo sapiens
  miR-30a-3p|0|-1
ctttcagtcggatgtttgcag

SEQ ID NO: 181 - DNA, 23 bp, homo sapiens
  miR-30a-3p|0|1
ctttcagtcggatgtttgcagct

SEQ ID NO: 182 - DNA, 20 bp, homo sapiens
  miR-30a-3p|0|-2
ctttcagtcggatgtttgca

SEQ ID NO: 183 - DNA, 24 bp, homo sapiens
  miR-30a-3p|0|2
ctttcagtcggatgtttgcagctg

SEQ ID NO: 184 - DNA, 19 bp, homo sapiens
  miR-30a-3p|0|-3
ctttcagtcggatgtttgc

SEQ ID NO: 185 - DNA, 18 bp, homo sapiens
  miR-30a-3p|0|-4
ctttcagtcggatgtttg

SEQ ID NO: 186 - DNA, 23 bp, homo sapiens
  miR-30a-3p|-1|0
gctttcagtcggatgtttgcagc

SEQ ID NO: 187 - DNA, 21 bp, homo sapiens
  miR-30a-3p|1|0
tttcagtcggatgtttgcagc

SEQ ID NO: 188 - DNA, 20 bp, homo sapiens
  miR-30a-3p|1|-1
tttcagtcggatgtttgcag

SEQ ID NO: 189 - DNA, 22 bp, homo sapiens
  miR-30a-3p|1|1
tttcagtcggatgtttgcagct

SEQ ID NO: 190 - DNA, 19 bp, homo sapiens
  miR-30a-3p|1|-2
tttcagtcggatgtttgca

SEQ ID NO: 191 - DNA, 23 bp, homo sapiens
  miR-30a-3p|1|2
tttcagtcggatgtttgcagctg

SEQ ID NO: 192 - DNA, 18 bp, homo sapiens
  miR-30a-3p|1|-3
tttcagtcggatgtttgc

SEQ ID NO: 193 - DNA, 20 bp, homo sapiens
  miR-30a-3p|2|0
ttcagtcggatgtttgcagc

SEQ ID NO: 194 - DNA, 19 bp, homo sapiens
  miR-30a-3p|2|-1
ttcagtcggatgtttgcag

SEQ ID NO: 195 - DNA, 21 bp, homo sapiens
  miR-30a-3p|2|1
ttcagtcggatgtttgcagct

SEQ ID NO: 196 - DNA, 21 bp, homo sapiens
  miR-32-5p|0|-1
tattgcacattactaagttgc

SEQ ID NO: 197 - DNA, 20 bp, homo sapiens
  miR-32-5p|0|-2
tattgcacattactaagttg

SEQ ID NO: 198 - DNA, 21 bp, homo sapiens
  miR-33a-5p|0|0
gtgcattgtagttgcattgca

SEQ ID NO: 199 - DNA, 20 bp, homo sapiens
  miR-33a-5p|0|-1
gtgcattgtagttgcattgc

SEQ ID NO: 200 - DNA, 22 bp, homo sapiens
  miR-33a-5p|0|1
gtgcattgtagttgcattgcat

SEQ ID NO: 201 - DNA, 23 bp, homo sapiens
  miR-92a-3p|0|1
tattgcacttgtcccggcctgtt

SEQ ID NO: 202 - DNA, 24 bp, homo sapiens
  miR-92a-3p|0|2
tattgcacttgtcccggcctgttg

SEQ ID NO: 203 - DNA, 25 bp, homo sapiens
  miR-92a-3p|0|3
tattgcacttgtcccggcctgttga

SEQ ID NO: 204 - DNA, 22 bp, homo sapiens
  miR-92a-3p|1|1
attgcacttgtcccggcctgtt

SEQ ID NO: 205 - DNA, 23 bp, homo sapiens
  miR-92a-3p|1|2
attgcacttgtcccggcctgttg

SEQ ID NO: 206 - DNA, 24 bp, homo sapiens
  miR-92a-3p|1|3
attgcacttgtcccggcctgttga

SEQ ID NO: 207 - DNA, 21 bp, homo sapiens
  miR-92a-3p|2|1
ttgcacttgtcccggcctgtt

SEQ ID NO: 208 - DNA, 22 bp, homo sapiens
  miR-92a-3p|2|2
ttgcacttgtcccggcctgttg

SEQ ID NO: 209 - DNA, 23 bp, homo sapiens
  miR-93-5p|0|0
caaagtgctgttcgtgcaggtag

SEQ ID NO: 210 - DNA, 22 bp, homo sapiens
  miR-93-5p|0|-1
caaagtgctgttcgtgcaggta

SEQ ID NO: 211 - DNA, 24 bp, homo sapiens
  miR-93-5p|0|1
caaagtgctgttcgtgcaggtagt

SEQ ID NO: 212 - DNA, 21 bp, homo sapiens
  miR-93-5p|0|-2
caaagtgctgttcgtgcaggt

SEQ ID NO: 213 - DNA, 25 bp, homo sapiens
  miR-93-5p|0|2
caaagtgctgttcgtgcaggtagtg

SEQ ID NO: 214 - DNA, 20 bp, homo sapiens
  miR-93-5p|0|-3
caaagtgctgttcgtgcagg

SEQ ID NO: 215 - DNA, 24 bp, homo sapiens
  miR-93-5p|-1|0
ccaaagtgctgttcgtgcaggtag

SEQ ID NO: 216 - DNA, 22 bp, homo sapiens
  miR-93-5p|1|0
aaagtgctgttcgtgcaggtag

SEQ ID NO: 217 - DNA, 23 bp, homo sapiens
  miR-93-5p|1|1
aaagtgctgttcgtgcaggtagt

SEQ ID NO: 218 - DNA, 22 bp, homo sapiens
  miR-95-3p|0|0
ttcaacgggtatttattgagca

SEQ ID NO: 219 - DNA, 23 bp, homo sapiens
  miR-95-3p|0|1
ttcaacgggtatttattgagcac

SEQ ID NO: 220 - DNA, 22 bp, homo sapiens
  miR-96-5p|0|-1
tttggcactagcacatttttgc

SEQ ID NO: 221 - DNA, 22 bp, homo sapiens
  miR-98-5p|0|0
tgaggtagtaagttgtattgtt

SEQ ID NO: 222 - DNA, 21 bp, homo sapiens
  miR-98-5p|0|-1
tgaggtagtaagttgtattgt

SEQ ID NO: 223 - DNA, 23 bp, homo sapiens
  miR-98-5p|0|1
tgaggtagtaagttgtattgttg

SEQ ID NO: 224 - DNA, 20 bp, homo sapiens
  miR-98-5p|0|-2
tgaggtagtaagttgtattg

SEQ ID NO: 225 - DNA, 24 bp, homo sapiens
  miR-98-5p|0|2
tgaggtagtaagttgtattgttgt

SEQ ID NO: 226 - DNA, 22 bp, homo sapiens
  miR-99a-5p|0|0
aacccgtagatccgatcttgtg

SEQ ID NO: 227 - DNA, 21 bp, homo sapiens
  miR-99a-5p|0|-1
aacccgtagatccgatcttgt

SEQ ID NO: 228 - DNA, 23 bp, homo sapiens
  miR-99a-5p|0|1
aacccgtagatccgatcttgtgg

SEQ ID NO: 229 - DNA, 20 bp, homo sapiens
  miR-99a-5p|0|-2
aacccgtagatccgatcttg

SEQ ID NO: 230 - DNA, 24 bp, homo sapiens
  miR-99a-5p|0|2
aacccgtagatccgatcttgtggt

SEQ ID NO: 231 - DNA, 19 bp, homo sapiens
  miR-99a-5p|0|-3
aacccgtagatccgatctt

SEQ ID NO: 232 - DNA, 22 bp, homo sapiens
  miR-99a-5p|-1|-1
aaacccgtagatccgatcttgt

SEQ ID NO: 233 - DNA, 20 bp, homo sapiens
  miR-99a-5p|1|-1
acccgtagatccgatcttgt

SEQ ID NO: 234 - DNA, 22 bp, homo sapiens
  miR-99a-5p|1|1
acccgtagatccgatcttgtgg

SEQ ID NO: 235 - DNA, 22 bp, homo sapiens
  miR-100-5p|0|0
aacccgtagatccgaacttgtg

SEQ ID NO: 236 - DNA, 21 bp, homo sapiens
  miR-100-5p|0|-1
aacccgtagatccgaacttgt

SEQ ID NO: 237 - DNA, 23 bp, homo sapiens
  miR-100-5p|0|1
aacccgtagatccgaacttgtgg

SEQ ID NO: 238 - DNA, 20 bp, homo sapiens
  miR-100-5p|0|-2
aacccgtagatccgaacttg

SEQ ID NO: 239 - DNA, 24 bp, homo sapiens
  miR-100-5p|0|2
aacccgtagatccgaacttgtggt

SEQ ID NO: 240 - DNA, 19 bp, homo sapiens
  miR-100-5p|0|-3
aacccgtagatccgaactt

SEQ ID NO: 241 - DNA, 20 bp, homo sapiens
  miR-100-5p|1|-1
acccgtagatccgaacttgt

SEQ ID NO: 242 - DNA, 22 bp, homo sapiens
  miR-100-5p|1|1
acccgtagatccgaacttgtgg

SEQ ID NO: 243 - DNA, 23 bp, homo sapiens
  miR-101-3p|0|2
tacagtactgtgataactgaagg

SEQ ID NO: 244 - DNA, 21 bp, homo sapiens
  miR-29b-3p|-1|-3
ctagcaccatttgaaatcagt

SEQ ID NO: 245 - DNA, 20 bp, homo sapiens
  miR-29b-3p|-1|-4
ctagcaccatttgaaatcag

SEQ ID NO: 246 - DNA, 25 bp, homo sapiens
  miR-103a-3p|0|2
agcagcattgtacagggctatgaaa

SEQ ID NO: 247 - DNA, 23 bp, homo sapiens
  miR-106a-5p|0|0
aaaagtgcttacagtgcaggtag

SEQ ID NO: 248 - DNA, 23 bp, homo sapiens
  miR-107|0|0
agcagcattgtacagggctatca

SEQ ID NO: 249 - DNA, 22 bp, homo sapiens
  miR-107|0|-1
agcagcattgtacagggctatc

SEQ ID NO: 250 - DNA, 24 bp, homo sapiens
  miR-107|0|1
agcagcattgtacagggctatcaa

SEQ ID NO: 251 - DNA, 25 bp, homo sapiens
  miR-107|0|2
agcagcattgtacagggctatcaaa

SEQ ID NO: 252 - DNA, 21 bp, homo sapiens
  miR-192-5p|0|0
ctgacctatgaattgacagcc

SEQ ID NO: 253 - DNA, 20 bp, homo sapiens
  miR-192-5p|0|-1
ctgacctatgaattgacagc

SEQ ID NO: 254 - DNA, 22 bp, homo sapiens
  miR-192-5p|0|1
ctgacctatgaattgacagcca

SEQ ID NO: 255 - DNA, 19 bp, homo sapiens
  miR-192-5p|0|-2
ctgacctatgaattgacag

SEQ ID NO: 256 - DNA, 23 bp, homo sapiens
  miR-192-5p|0|2
ctgacctatgaattgacagccag

SEQ ID NO: 257 - DNA, 24 bp, homo sapiens
  miR-192-5p|0|3
ctgacctatgaattgacagccagt

SEQ ID NO: 258 - DNA, 20 bp, homo sapiens
  miR-192-5p|1|0
tgacctatgaattgacagcc

SEQ ID NO: 259 - DNA, 21 bp, homo sapiens
  miR-192-5p|1|1
tgacctatgaattgacagcca

SEQ ID NO: 260 - DNA, 22 bp, homo sapiens
  miR-192-5p|1|2
tgacctatgaattgacagccag

SEQ ID NO: 261 - DNA, 23 bp, homo sapiens
  miR-192-5p|1|3
tgacctatgaattgacagccagt

SEQ ID NO: 262 - DNA, 22 bp, homo sapiens
  miR-197-3p|0|0
ttcaccaccttctccacccagc

SEQ ID NO: 263 - DNA, 21 bp, homo sapiens
  miR-197-3p|0|-1
ttcaccaccttctccacccag

SEQ ID NO: 264 - DNA, 23 bp, homo sapiens
  miR-197-3p|0|1
ttcaccaccttctccacccagca

SEQ ID NO: 265 - DNA, 20 bp, homo sapiens
  miR-197-3p|0|-2
ttcaccaccttctccaccca

SEQ ID NO: 266 - DNA, 24 bp, homo sapiens
  miR-197-3p|0|2
ttcaccaccttctccacccagcat

SEQ ID NO: 267 - DNA, 23 bp, homo sapiens
  miR-197-3p|-1|0
cttcaccaccttctccacccagc

SEQ ID NO: 268 - DNA, 23 bp, homo sapiens
  miR-199a-5p|0|0
cccagtgttcagactacctgttc

SEQ ID NO: 269 - DNA, 22 bp, homo sapiens
  miR-199a-5p|0|-1
cccagtgttcagactacctgtt

SEQ ID NO: 270 - DNA, 22 bp, homo sapiens
  miR-199a-3p|0|0
acagtagtctgcacattggtta

SEQ ID NO: 271 - DNA, 21 bp, homo sapiens
  miR-199a-3p|0|-1
acagtagtctgcacattggtt

SEQ ID NO: 272 - DNA, 23 bp, homo sapiens
  miR-199a-3p|0|1
acagtagtctgcacattggttag

SEQ ID NO: 273 - DNA, 20 bp, homo sapiens
  miR-199a-3p|0|-2
acagtagtctgcacattggt

SEQ ID NO: 274 - DNA, 24 bp, homo sapiens
  miR-199a-3p|0|2
acagtagtctgcacattggttaga

SEQ ID NO: 275 - DNA, 23 bp, homo sapiens
  miR-199a-3p|-1|0
tacagtagtctgcacattggtta

SEQ ID NO: 276 - DNA, 21 bp, homo sapiens
  miR-199a-3p|1|0
cagtagtctgcacattggtta

SEQ ID NO: 277 - DNA, 22 bp, homo sapiens
  miR-199a-3p|-1|-1
tacagtagtctgcacattggtt

SEQ ID NO: 278 - DNA, 20 bp, homo sapiens
  miR-199a-3p|1|-1
cagtagtctgcacattggtt

SEQ ID NO: 279 - DNA, 22 bp, homo sapiens
  miR-199a-3p|1|1
cagtagtctgcacattggttag

SEQ ID NO: 280 - DNA, 21 bp, homo sapiens
  miR-199a-3p|-1|-2
tacagtagtctgcacattggt

SEQ ID NO: 281 - DNA, 23 bp, homo sapiens
  miR-199a-3p|1|2
cagtagtctgcacattggttaga

SEQ ID NO: 282 - DNA, 21 bp, homo sapiens
  miR-129-5p|0|0
ctttttgcggtctgggcttgc

SEQ ID NO: 283 - DNA, 20 bp, homo sapiens
  miR-129-5p|0|-1
ctttttgcggtctgggcttg

SEQ ID NO: 284 - DNA, 22 bp, homo sapiens
  miR-148a-3p|0|0
tcagtgcactacagaactttgt

SEQ ID NO: 285 - DNA, 21 bp, homo sapiens
  miR-148a-3p|0|-1
tcagtgcactacagaactttg

SEQ ID NO: 286 - DNA, 23 bp, homo sapiens
  miR-148a-3p|0|1
tcagtgcactacagaactttgtc

SEQ ID NO: 287 - DNA, 20 bp, homo sapiens
  miR-148a-3p|0|-2
tcagtgcactacagaacttt

SEQ ID NO: 288 - DNA, 24 bp, homo sapiens
  miR-148a-3p|0|2
tcagtgcactacagaactttgtct

SEQ ID NO: 289 - DNA, 25 bp, homo sapiens
  miR-148a-3p|0|3
tcagtgcactacagaactttgtctc

SEQ ID NO: 290 - DNA, 23 bp, homo sapiens
  miR-148a-3p|-1|0
gtcagtgcactacagaactttgt

SEQ ID NO: 291 - DNA, 21 bp, homo sapiens
  miR-148a-3p|1|0
cagtgcactacagaactttgt

SEQ ID NO: 292 - DNA, 22 bp, homo sapiens
  miR-148a-3p|-1|-1
gtcagtgcactacagaactttg

SEQ ID NO: 293 - DNA, 22 bp, homo sapiens
  miR-148a-3p|1|1
cagtgcactacagaactttgtc

SEQ ID NO: 294 - DNA, 23 bp, homo sapiens
  miR-148a-3p|1|2
cagtgcactacagaactttgtct

SEQ ID NO: 295 - DNA, 22 bp, homo sapiens
  miR-30d-5p|0|0
tgtaaacatccccgactggaag

SEQ ID NO: 296 - DNA, 21 bp, homo sapiens
  miR-30d-5p|0|-1
tgtaaacatccccgactggaa

SEQ ID NO: 297 - DNA, 23 bp, homo sapiens
  miR-30d-5p|0|1
tgtaaacatccccgactggaagc

SEQ ID NO: 298 - DNA, 20 bp, homo sapiens
  miR-30d-5p|0|-2
tgtaaacatccccgactgga

SEQ ID NO: 299 - DNA, 24 bp, homo sapiens
  miR-30d-5p|0|2
tgtaaacatccccgactggaagct

SEQ ID NO: 300 - DNA, 19 bp, homo sapiens
  miR-30d-5p|0|-3
tgtaaacatccccgactgg

SEQ ID NO: 301 - DNA, 25 bp, homo sapiens
  miR-30d-5p|0|3
tgtaaacatccccgactggaagctg

SEQ ID NO: 302 - DNA, 18 bp, homo sapiens
  miR-30d-5p|0|-4
tgtaaacatccccgactg

SEQ ID NO: 303 - DNA, 26 bp, homo sapiens
  miR-30d-5p|0|4
tgtaaacatccccgactggaagctgt

SEQ ID NO: 304 - DNA, 23 bp, homo sapiens
  miR-30d-5p|-1|0
ttgtaaacatccccgactggaag

SEQ ID NO: 305 - DNA, 21 bp, homo sapiens
  miR-30d-5p|1|0
gtaaacatccccgactggaag

SEQ ID NO: 306 - DNA, 24 bp, homo sapiens
  miR-30d-5p|-1|1
ttgtaaacatccccgactggaagc

SEQ ID NO: 307 - DNA, 22 bp, homo sapiens
  miR-30d-5p|1|1
gtaaacatccccgactggaagc

SEQ ID NO: 308 - DNA, 20 bp, homo sapiens
  miR-30d-5p|2|0
taaacatccccgactggaag

SEQ ID NO: 309 - DNA, 23 bp, homo sapiens
  miR-139-5p|0|0
tctacagtgcacgtgtctccagt

SEQ ID NO: 310 - DNA, 22 bp, homo sapiens
  miR-139-5p|0|-1
tctacagtgcacgtgtctccag

SEQ ID NO: 311 - DNA, 21 bp, homo sapiens
  miR-139-5p|0|-2
tctacagtgcacgtgtctcca

SEQ ID NO: 312 - DNA, 23 bp, homo sapiens
  miR-10a-5p|0|0
taccctgtagatccgaatttgtg

SEQ ID NO: 313 - DNA, 22 bp, homo sapiens
  miR-10a-5p|0|-1
taccctgtagatccgaatttgt

SEQ ID NO: 314 - DNA, 24 bp, homo sapiens
  miR-10a-5p|0|1
taccctgtagatccgaatttgtgt

SEQ ID NO: 315 - DNA, 21 bp, homo sapiens
  miR-10a-5p|0|-2
taccctgtagatccgaatttg

SEQ ID NO: 316 - DNA, 22 bp, homo sapiens
  miR-10a-5p|1|0
accctgtagatccgaatttgtg

SEQ ID NO: 317 - DNA, 23 bp, homo sapiens
  miR-10a-5p|-1|-1
ataccctgtagatccgaatttgt

SEQ ID NO: 318 - DNA, 21 bp, homo sapiens
  miR-10a-5p|1|-1
accctgtagatccgaatttgt

SEQ ID NO: 319 - DNA, 23 bp, homo sapiens
  miR-10a-5p|1|1
accctgtagatccgaatttgtgt

SEQ ID NO: 320 - DNA, 20 bp, homo sapiens
  miR-10a-5p|1|-2
accctgtagatccgaatttg

SEQ ID NO: 321 - DNA, 23 bp, homo sapiens
  miR-10b-5p|0|0
taccctgtagaaccgaatttgtg

SEQ ID NO: 322 - DNA, 22 bp, homo sapiens
  miR-10b-5p|0|-1
taccctgtagaaccgaatttgt

SEQ ID NO: 323 - DNA, 24 bp, homo sapiens
  miR-10b-5p|0|1
taccctgtagaaccgaatttgtgt

SEQ ID NO: 324 - DNA, 21 bp, homo sapiens
  miR-10b-5p|0|-2
taccctgtagaaccgaatttg

SEQ ID NO: 325 - DNA, 20 bp, homo sapiens
  miR-10b-5p|0|-3
taccctgtagaaccgaattt

SEQ ID NO: 326 - DNA, 22 bp, homo sapiens
  miR-10b-5p|1|0
accctgtagaaccgaatttgtg

SEQ ID NO: 327 - DNA, 21 bp, homo sapiens
  miR-10b-5p|1|-1
accctgtagaaccgaatttgt

SEQ ID NO: 328 - DNA, 23 bp, homo sapiens
  miR-10b-5p|1|1
accctgtagaaccgaatttgtgt

SEQ ID NO: 329 - DNA, 20 bp, homo sapiens
  miR-10b-5p|1|-2
accctgtagaaccgaatttg

SEQ ID NO: 330 - DNA, 22 bp, homo sapiens
  miR-34a-5p|0|0
tggcagtgtcttagctggttgt

SEQ ID NO: 331 - DNA, 21 bp, homo sapiens
  miR-34a-5p|0|-1
tggcagtgtcttagctggttg

SEQ ID NO: 332 - DNA, 23 bp, homo sapiens
  miR-34a-5p|0|1
tggcagtgtcttagctggttgtt

SEQ ID NO: 333 - DNA, 20 bp, homo sapiens
  miR-34a-5p|0|-2
tggcagtgtcttagctggtt

SEQ ID NO: 334 - DNA, 24 bp, homo sapiens
  miR-34a-5p|0|2
tggcagtgtcttagctggttgttg

SEQ ID NO: 335 - DNA, 25 bp, homo sapiens
  miR-34a-5p|0|3
tggcagtgtcttagctggttgttgt

SEQ ID NO: 336 - DNA, 23 bp, homo sapiens
  miR-34a-5p|-1|0
ttggcagtgtcttagctggttgt

SEQ ID NO: 337 - DNA, 22 bp, homo sapiens
  miR-34a-5p|-1|-1
ttggcagtgtcttagctggttg

SEQ ID NO: 338 - DNA, 22 bp, homo sapiens
  miR-34a-5p|1|1
ggcagtgtcttagctggttgtt

SEQ ID NO: 339 - DNA, 23 bp, homo sapiens
  miR-34a-5p|1|2
ggcagtgtcttagctggttgttg

SEQ ID NO: 340 - DNA, 23 bp, homo sapiens
  miR-181a-5p|0|0
aacattcaacgctgtcggtgagt

SEQ ID NO: 341 - DNA, 22 bp, homo sapiens
  miR-181a-5p|0|-1
aacattcaacgctgtcggtgag

SEQ ID NO: 342 - DNA, 21 bp, homo sapiens
  miR-181a-5p|0|-2
aacattcaacgctgtcggtga

SEQ ID NO: 343 - DNA, 20 bp, homo sapiens
  miR-181a-5p|0|-3
aacattcaacgctgtcggtg

SEQ ID NO: 344 - DNA, 19 bp, homo sapiens
  miR-181a-5p|0|-4
aacattcaacgctgtcggt

SEQ ID NO: 345 - DNA, 18 bp, homo sapiens
  miR-181a-5p|0|-5
aacattcaacgctgtcgg

SEQ ID NO: 346 - DNA, 22 bp, homo sapiens
  miR-181a-5p|1|0
acattcaacgctgtcggtgagt

SEQ ID NO: 347 - DNA, 21 bp, homo sapiens
  miR-181a-5p|1|-1
acattcaacgctgtcggtgag

SEQ ID NO: 348 - DNA, 23 bp, homo sapiens
  miR-181b-5p|0|0
aacattcattgctgtcggtgggt

SEQ ID NO: 349 - DNA, 22 bp, homo sapiens
  miR-181b-5p|0|-1
aacattcattgctgtcggtggg

SEQ ID NO: 350 - DNA, 21 bp, homo sapiens
  miR-181b-5p|0|-2
aacattcattgctgtcggtgg

SEQ ID NO: 351 - DNA, 25 bp, homo sapiens
  miR-181b-5p|0|2
aacattcattgctgtcggtgggttg

SEQ ID NO: 352 - DNA, 20 bp, homo sapiens
  miR-181b-5p|0|-3
aacattcattgctgtcggtg

SEQ ID NO: 353 - DNA, 22 bp, homo sapiens
  miR-181b-5p|1|0
acattcattgctgtcggtgggt

SEQ ID NO: 354 - DNA, 21 bp, homo sapiens
  miR-181b-5p|1|-1
acattcattgctgtcggtggg

SEQ ID NO: 355 - DNA, 23 bp, homo sapiens
  miR-181b-5p|1|1
acattcattgctgtcggtgggtt

SEQ ID NO: 356 - DNA, 20 bp, homo sapiens
  miR-181b-5p|1|-2
acattcattgctgtcggtgg

SEQ ID NO: 357 - DNA, 22 bp, homo sapiens
  miR-181c-5p|0|0
aacattcaacctgtcggtgagt

SEQ ID NO: 358 - DNA, 21 bp, homo sapiens
  miR-181c-5p|0|-1
aacattcaacctgtcggtgag

SEQ ID NO: 359 - DNA, 23 bp, homo sapiens
  miR-181c-5p|0|1
aacattcaacctgtcggtgagtt

SEQ ID NO: 360 - DNA, 24 bp, homo sapiens
  miR-182-5p|0|0
tttggcaatggtagaactcacact

SEQ ID NO: 361 - DNA, 23 bp, homo sapiens
  miR-182-5p|0|-1
tttggcaatggtagaactcacac

SEQ ID NO: 362 - DNA, 25 bp, homo sapiens
  miR-182-5p|0|1
tttggcaatggtagaactcacactg

SEQ ID NO: 363 - DNA, 22 bp, homo sapiens
  miR-182-5p|0|-2
tttggcaatggtagaactcaca

SEQ ID NO: 364 - DNA, 26 bp, homo sapiens
  miR-182-5p|0|2
tttggcaatggtagaactcacactgg

SEQ ID NO: 365 - DNA, 21 bp, homo sapiens
  miR-182-5p|0|-3
tttggcaatggtagaactcac

SEQ ID NO: 366 - DNA, 27 bp, homo sapiens
  miR-182-5p|0|3
tttggcaatggtagaactcacactggt

SEQ ID NO: 367 - DNA, 20 bp, homo sapiens
  miR-182-5p|0|-4
tttggcaatggtagaactca

SEQ ID NO: 368 - DNA, 19 bp, homo sapiens
  miR-182-5p|0|-5
tttggcaatggtagaactc

SEQ ID NO: 369 - DNA, 22 bp, homo sapiens
  miR-183-5p|0|0
tatggcactggtagaattcact

SEQ ID NO: 370 - DNA, 21 bp, homo sapiens
  miR-183-5p|0|-1
tatggcactggtagaattcac

SEQ ID NO: 371 - DNA, 23 bp, homo sapiens
  miR-183-5p|0|1
tatggcactggtagaattcactg

SEQ ID NO: 372 - DNA, 20 bp, homo sapiens
  miR-183-5p|0|-2
tatggcactggtagaattca

SEQ ID NO: 373 - DNA, 24 bp, homo sapiens
  miR-183-5p|0|2
tatggcactggtagaattcactgt

SEQ ID NO: 374 - DNA, 19 bp, homo sapiens
  miR-183-5p|0|-3
tatggcactggtagaattc

SEQ ID NO: 375 - DNA, 21 bp, homo sapiens
  miR-183-5p|1|0
atggcactggtagaattcact

SEQ ID NO: 376 - DNA, 20 bp, homo sapiens
  miR-183-5p|1|-1
atggcactggtagaattcac

SEQ ID NO: 377 - DNA, 22 bp, homo sapiens
  miR-183-5p|1|1
atggcactggtagaattcactg

SEQ ID NO: 378 - DNA, 19 bp, homo sapiens
  miR-183-5p|1|-2
atggcactggtagaattca

SEQ ID NO: 379 - DNA, 23 bp, homo sapiens
  miR-183-5p|1|2
atggcactggtagaattcactgt

SEQ ID NO: 380 - DNA, 23 bp, homo sapiens
  miR-183-5p|-2|-1
tgtatggcactggtagaattcac

SEQ ID NO: 381 - DNA, 22 bp, homo sapiens
  miR-183-5p|-2|-2
tgtatggcactggtagaattca

SEQ ID NO: 382 - DNA, 21 bp, homo sapiens
  miR-183-5p|-2|-3
tgtatggcactggtagaattc

SEQ ID NO: 383 - DNA, 22 bp, homo sapiens
  miR-187-3p|0|0
tcgtgtcttgtgttgcagccgg

SEQ ID NO: 384 - DNA, 21 bp, homo sapiens
  miR-187-3p|0|-1
tcgtgtcttgtgttgcagccg

SEQ ID NO: 385 - DNA, 23 bp, homo sapiens
  miR-187-3p|0|1
tcgtgtcttgtgttgcagccgga

SEQ ID NO: 386 - DNA, 24 bp, homo sapiens
  miR-187-3p|0|2
tcgtgtcttgtgttgcagccggag

SEQ ID NO: 387 - DNA, 23 bp, homo sapiens
  miR-187-3p|-1|0
ctcgtgtcttgtgttgcagccgg

SEQ ID NO: 388 - DNA, 21 bp, homo sapiens
  miR-187-3p|1|0
cgtgtcttgtgttgcagccgg

SEQ ID NO: 389 - DNA, 22 bp, homo sapiens
  miR-187-3p|-1|-1
ctcgtgtcttgtgttgcagccg

SEQ ID NO: 390 - DNA, 22 bp, homo sapiens
  miR-187-3p|1|1
cgtgtcttgtgttgcagccgga

SEQ ID NO: 391 - DNA, 23 bp, homo sapiens
  263=miR-199b-5p|0|0
cccagtgtttagactatctgttc

SEQ ID NO: 392 - DNA, 22 bp, homo sapiens
  263=miR-199b-5p|0|-1
cccagtgtttagactatctgtt

SEQ ID NO: 393 - DNA, 24 bp, homo sapiens
  263=miR-199b-5p|0|1
cccagtgtttagactatctgttca

SEQ ID NO: 394 - DNA, 22 bp, homo sapiens
  2miR-203a|0|0
gtgaaatgtttaggaccactag

SEQ ID NO: 395 - DNA, 23 bp, homo sapiens
  2miR-203a|0|1
gtgaaatgtttaggaccactaga

SEQ ID NO: 396 - DNA, 21 bp, homo sapiens
  2miR-203a|1|0
tgaaatgtttaggaccactag

SEQ ID NO: 397 - DNA, 22 bp, homo sapiens
  2miR-203a|1|1
tgaaatgtttaggaccactaga

SEQ ID NO: 398 - DNA, 23 bp, homo sapiens
  2miR-203a|1|2
tgaaatgtttaggaccactagac

SEQ ID NO: 399 - DNA, 22 bp, homo sapiens
  2miR-204-5p|0|0
ttccctttgtcatcctatgcct

SEQ ID NO: 400 - DNA, 21 bp, homo sapiens
  2miR-204-5p|0|-1
ttccctttgtcatcctatgcc

SEQ ID NO: 401 - DNA, 23 bp, homo sapiens
  2miR-204-5p|0|1
ttccctttgtcatcctatgcctg

SEQ ID NO: 402 - DNA, 20 bp, homo sapiens
  2miR-204-5p|0|-2
ttccctttgtcatcctatgc

SEQ ID NO: 403 - DNA, 24 bp, homo sapiens
  2miR-204-5p|0|2
ttccctttgtcatcctatgcctga

SEQ ID NO: 404 - DNA, 22 bp, homo sapiens
  2miR-210-3p|0|0
ctgtgcgtgtgacagcggctga

SEQ ID NO: 405 - DNA, 21 bp, homo sapiens
  2miR-210-3p|0|-1
ctgtgcgtgtgacagcggctg

SEQ ID NO: 406 - DNA, 23 bp, homo sapiens
  2miR-210-3p|0|1
ctgtgcgtgtgacagcggctgat

SEQ ID NO: 407 - DNA, 20 bp, homo sapiens
  2miR-210-3p|0|-2
ctgtgcgtgtgacagcggct

SEQ ID NO: 408 - DNA, 24 bp, homo sapiens
  2miR-210-3p|0|2
ctgtgcgtgtgacagcggctgatc

SEQ ID NO: 409 - DNA, 25 bp, homo sapiens
  2miR-210-3p|0|3
ctgtgcgtgtgacagcggctgatct

SEQ ID NO: 410 - DNA, 23 bp, homo sapiens
  2miR-210-3p|-1|0
actgtgcgtgtgacagcggctga

SEQ ID NO: 411 - DNA, 24 bp, homo sapiens
  2miR-210-3p|-1|1
actgtgcgtgtgacagcggctgat

SEQ ID NO: 412 - DNA, 22 bp, homo sapiens
  2miR-211-5p|0|0
ttccctttgtcatccttcgcct

SEQ ID NO: 413 - DNA, 21 bp, homo sapiens
  2miR-211-5p|0|-1
ttccctttgtcatccttcgcc

SEQ ID NO: 414 - DNA, 23 bp, homo sapiens
  2miR-211-5p|0|1
ttccctttgtcatccttcgccta

SEQ ID NO: 415 - DNA, 20 bp, homo sapiens
  2miR-211-5p|0|-2
ttccctttgtcatccttcgc

SEQ ID NO: 416 - DNA, 24 bp, homo sapiens
  2miR-211-5p|0|2
ttccctttgtcatccttcgcctag

SEQ ID NO: 417 - DNA, 19 bp, homo sapiens
  2miR-211-5p|0|-3
ttccctttgtcatccttcg

SEQ ID NO: 418 - DNA, 25 bp, homo sapiens
  2miR-211-5p|0|3
ttccctttgtcatccttcgcctagg

SEQ ID NO: 419 - DNA, 18 bp, homo sapiens
  2miR-211-5p|0|-4
ttccctttgtcatccttc

SEQ ID NO: 420 - DNA, 23 bp, homo sapiens
  2miR-211-5p|-1|0
cttccctttgtcatccttcgcct

SEQ ID NO: 421 - DNA, 21 bp, homo sapiens
  2miR-211-5p|1|0
tccctttgtcatccttcgcct

SEQ ID NO: 422 - DNA, 22 bp, homo sapiens
  2miR-211-5p|-1|-1
cttccctttgtcatccttcgcc

SEQ ID NO: 423 - DNA, 21 bp, homo sapiens
  2miR-212-3p|0|0
taacagtctccagtcacggcc

SEQ ID NO: 424 - DNA, 22 bp, homo sapiens
  2miR-212-3p|0|1
taacagtctccagtcacggcca

SEQ ID NO: 425 - DNA, 19 bp, homo sapiens
  2miR-212-3p|0|-2
taacagtctccagtcacgg

SEQ ID NO: 426 - DNA, 23 bp, homo sapiens
  2miR-212-3p|0|2
taacagtctccagtcacggccac

SEQ ID NO: 427 - DNA, 22 bp, homo sapiens
  2miR-181a-3p|0|0
accatcgaccgttgattgtacc

SEQ ID NO: 428 - DNA, 21 bp, homo sapiens
  2miR-181a-3p|0|-1
accatcgaccgttgattgtac

SEQ ID NO: 429 - DNA, 20 bp, homo sapiens
  2miR-181a-3p|0|-2
accatcgaccgttgattgta

SEQ ID NO: 430 - DNA, 19 bp, homo sapiens
  2miR-181a-3p|0|-3
accatcgaccgttgattgt

SEQ ID NO: 431 - DNA, 23 bp, homo sapiens
  274=miR-217|0|0
tactgcatcaggaactgattgga

SEQ ID NO: 432 - DNA, 22 bp, homo sapiens
  274=miR-217|0|-1
tactgcatcaggaactgattgg

SEQ ID NO: 433 - DNA, 23 bp, homo sapiens
  274=miR-217|-1|-1
atactgcatcaggaactgattgg

SEQ ID NO: 434 - DNA, 23 bp, homo sapiens
  2miR-218-5p|0|2
ttgtgcttgatctaaccatgtgg

SEQ ID NO: 435 - DNA, 23 bp, homo sapiens
  2miR-221-3p|0|0
agctacattgtctgctgggtttc

SEQ ID NO: 436 - DNA, 22 bp, homo sapiens
  2miR-221-3p|0|-1
agctacattgtctgctgggttt

SEQ ID NO: 437 - DNA, 24 bp, homo sapiens
  2miR-221-3p|0|1
agctacattgtctgctgggtttca

SEQ ID NO: 438 - DNA, 21 bp, homo sapiens
  2miR-221-3p|0|-2
agctacattgtctgctgggtt

SEQ ID NO: 439 - DNA, 20 bp, homo sapiens
  2miR-221-3p|0|-3
agctacattgtctgctgggt

SEQ ID NO: 440 - DNA, 19 bp, homo sapiens
  2miR-221-3p|0|-4
agctacattgtctgctggg

SEQ ID NO: 441 - DNA, 21 bp, homo sapiens
  miR-222-3p|0|0
agctacatctggctactgggt

SEQ ID NO: 442 - DNA, 20 bp, homo sapiens
  miR-222-3p|0|-1
agctacatctggctactggg

SEQ ID NO: 443 - DNA, 22 bp, homo sapiens
  miR-222-3p|0|1
agctacatctggctactgggtc

SEQ ID NO: 444 - DNA, 23 bp, homo sapiens
  miR-222-3p|0|2
agctacatctggctactgggtct

SEQ ID NO: 445 - DNA, 24 bp, homo sapiens
  miR-222-3p|0|3
agctacatctggctactgggtctc

SEQ ID NO: 446 - DNA, 25 bp, homo sapiens
  miR-222-3p|0|4
agctacatctggctactgggtctct

SEQ ID NO: 447 - DNA, 22 bp, homo sapiens
  2miR-223-3p|0|0
tgtcagtttgtcaaatacccca

SEQ ID NO: 448 - DNA, 21 bp, homo sapiens
  2miR-223-3p|0|-1
tgtcagtttgtcaaatacccc

SEQ ID NO: 449 - DNA, 23 bp, homo sapiens
  2miR-223-3p|0|1
tgtcagtttgtcaaataccccaa

SEQ ID NO: 450 - DNA, 24 bp, homo sapiens
  2miR-223-3p|0|2
tgtcagtttgtcaaataccccaag

SEQ ID NO: 451 - DNA, 21 bp, homo sapiens
  2miR-223-3p|1|0
gtcagtttgtcaaatacccca

SEQ ID NO: 452 - DNA, 22 bp, homo sapiens
  2miR-223-3p|1|1
gtcagtttgtcaaataccccaa

SEQ ID NO: 453 - DNA, 22 bp, homo sapiens
  2miR-224-5p|0|1
caagtcactagtggttccgttt

SEQ ID NO: 454 - DNA, 24 bp, homo sapiens
  2miR-224-5p|0|3
caagtcactagtggttccgtttag

SEQ ID NO: 455 - DNA, 22 bp, homo sapiens
  miR-200b-3p|0|0
taatactgcctggtaatgatga

SEQ ID NO: 456 - DNA, 22 bp, homo sapiens
  let-7g-5p|0|0
tgaggtagtagtttgtacagtt

SEQ ID NO: 457 - DNA, 21 bp, homo sapiens
  let-7g-5p|0|-1
tgaggtagtagtttgtacagt

SEQ ID NO: 458 - DNA, 23 bp, homo sapiens
  let-7g-5p|0|1
tgaggtagtagtttgtacagttt

SEQ ID NO: 459 - DNA, 20 bp, homo sapiens
  let-7g-5p|0|-2
tgaggtagtagtttgtacag

SEQ ID NO: 460 - DNA, 24 bp, homo sapiens
  let-7g-5p|0|2
tgaggtagtagtttgtacagtttg

SEQ ID NO: 461 - DNA, 19 bp, homo sapiens
  let-7g-5p|0|-3
tgaggtagtagtttgtaca

SEQ ID NO: 462 - DNA, 18 bp, homo sapiens
  let-7g-5p|0|-4
tgaggtagtagtttgtac

SEQ ID NO: 463 - DNA, 23 bp, homo sapiens
  let-7g-5p|-1|0
ctgaggtagtagtttgtacagtt

SEQ ID NO: 464 - DNA, 22 bp, homo sapiens
  let-7g-5p|-1|-1
ctgaggtagtagtttgtacagt

SEQ ID NO: 465 - DNA, 21 bp, homo sapiens
  let-7g-5p|-1|-2
ctgaggtagtagtttgtacag

SEQ ID NO: 466 - DNA, 22 bp, homo sapiens
  let-7i-5p|0|0
tgaggtagtagtttgtgctgtt

SEQ ID NO: 467 - DNA, 21 bp, homo sapiens
  let-7i-5p|0|-1
tgaggtagtagtttgtgctgt

SEQ ID NO: 468 - DNA, 23 bp, homo sapiens
  let-7i-5p|0|1
tgaggtagtagtttgtgctgttg

SEQ ID NO: 469 - DNA, 20 bp, homo sapiens
  let-7i-5p|0|-2
tgaggtagtagtttgtgctg

SEQ ID NO: 470 - DNA, 24 bp, homo sapiens
  let-7i-5p|0|2
tgaggtagtagtttgtgctgttgg

SEQ ID NO: 471 - DNA, 25 bp, homo sapiens
  let-7i-5p|0|3
tgaggtagtagtttgtgctgttggt

SEQ ID NO: 472 - DNA, 23 bp, homo sapiens
  miR-1|0|1
tggaatgtaaagaagtatgtatt

SEQ ID NO: 473 - DNA, 22 bp, homo sapiens
  miR-15b-5p|0|0
tagcagcacatcatggtttaca

SEQ ID NO: 474 - DNA, 21 bp, homo sapiens
  miR-15b-5p|0|-1
tagcagcacatcatggtttac

SEQ ID NO: 475 - DNA, 23 bp, homo sapiens
  miR-15b-5p|0|1
tagcagcacatcatggtttacat

SEQ ID NO: 476 - DNA, 20 bp, homo sapiens
  miR-15b-5p|0|-2
tagcagcacatcatggttta

SEQ ID NO: 477 - DNA, 19 bp, homo sapiens
  miR-15b-5p|0|-3
tagcagcacatcatggttt

SEQ ID NO: 478 - DNA, 18 bp, homo sapiens
  miR-15b-5p|0|-4
tagcagcacatcatggtt

SEQ ID NO: 479 - DNA, 21 bp, homo sapiens
  miR-23b-3p|0|0
atcacattgccagggattacc

SEQ ID NO: 480 - DNA, 20 bp, homo sapiens
  miR-23b-3p|0|-1
atcacattgccagggattac

SEQ ID NO: 481 - DNA, 22 bp, homo sapiens
  miR-23b-3p|0|1
atcacattgccagggattacca

SEQ ID NO: 482 - DNA, 19 bp, homo sapiens
  miR-23b-3p|0|-2
atcacattgccagggatta

SEQ ID NO: 483 - DNA, 23 bp, homo sapiens
  miR-23b-3p|0|2
atcacattgccagggattaccac

SEQ ID NO: 484 - DNA, 24 bp, homo sapiens
  miR-23b-3p|0|3
atcacattgccagggattaccacg

SEQ ID NO: 485 - DNA, 20 bp, homo sapiens
  miR-23b-3p|1|0
tcacattgccagggattacc

SEQ ID NO: 486 - DNA, 21 bp, homo sapiens
  miR-23b-3p|1|1
tcacattgccagggattacca

SEQ ID NO: 487 - DNA, 22 bp, homo sapiens
  miR-23b-3p|1|2
tcacattgccagggattaccac

SEQ ID NO: 488 - DNA, 23 bp, homo sapiens
  miR-23b-3p|1|3
tcacattgccagggattaccacg

SEQ ID NO: 489 - DNA, 21 bp, homo sapiens
  miR-27b-3p|0|0
ttcacagtggctaagttctgc

SEQ ID NO: 490 - DNA, 20 bp, homo sapiens
  miR-27b-3p|0|-1
ttcacagtggctaagttctg

SEQ ID NO: 491 - DNA, 22 bp, homo sapiens
  miR-27b-3p|0|1
ttcacagtggctaagttctgca

SEQ ID NO: 492 - DNA, 19 bp, homo sapiens
  miR-27b-3p|0|-2
ttcacagtggctaagttct

SEQ ID NO: 493 - DNA, 23 bp, homo sapiens
  miR-27b-3p|0|2
ttcacagtggctaagttctgcac

SEQ ID NO: 494 - DNA, 22 bp, homo sapiens
  miR-27b-3p|-1|0
gttcacagtggctaagttctgc

SEQ ID NO: 495 - DNA, 21 bp, homo sapiens
  miR-27b-3p|-1|-1
gttcacagtggctaagttctg

SEQ ID NO: 496 - DNA, 22 bp, homo sapiens
  miR-30b-5p|0|0
tgtaaacatcctacactcagct

SEQ ID NO: 497 - DNA, 21 bp, homo sapiens
  miR-30b-5p|0|-1
tgtaaacatcctacactcagc

SEQ ID NO: 498 - DNA, 23 bp, homo sapiens
  miR-30b-5p|0|1
tgtaaacatcctacactcagctg

SEQ ID NO: 499 - DNA, 20 bp, homo sapiens
  miR-30b-5p|0|-2
tgtaaacatcctacactcag

SEQ ID NO: 500 - DNA, 24 bp, homo sapiens
  miR-30b-5p|0|2
tgtaaacatcctacactcagctgt

SEQ ID NO: 501 - DNA, 22 bp, homo sapiens
  miR-125b-5p|0|0
tccctgagaccctaacttgtga

SEQ ID NO: 502 - DNA, 21 bp, homo sapiens
  miR-125b-5p|0|-1
tccctgagaccctaacttgtg

SEQ ID NO: 503 - DNA, 23 bp, homo sapiens
  miR-125b-5p|0|1
tccctgagaccctaacttgtgat

SEQ ID NO: 504 - DNA, 20 bp, homo sapiens
  miR-125b-5p|0|-2
tccctgagaccctaacttgt

SEQ ID NO: 505 - DNA, 19 bp, homo sapiens
  miR-125b-5p|0|-3
tccctgagaccctaacttg

SEQ ID NO: 506 - DNA, 21 bp, homo sapiens
  miR-125b-5p|1|0
ccctgagaccctaacttgtga

SEQ ID NO: 507 - DNA, 22 bp, homo sapiens
  miR-128-3p|0|1
tcacagtgaaccggtctctttt

SEQ ID NO: 508 - DNA, 19 bp, homo sapiens
  miR-128-3p|0|-2
tcacagtgaaccggtctct

SEQ ID NO: 509 - DNA, 23 bp, homo sapiens
  miR-128-3p|0|2
tcacagtgaaccggtctcttttt

SEQ ID NO: 510 - DNA, 22 bp, homo sapiens
  miR-130a-3p|0|0
cagtgcaatgttaaaagggcat

SEQ ID NO: 511 - DNA, 21 bp, homo sapiens
  miR-130a-3p|0|-1
cagtgcaatgttaaaagggca

SEQ ID NO: 512 - DNA, 23 bp, homo sapiens
  miR-130a-3p|0|1
cagtgcaatgttaaaagggcatt

SEQ ID NO: 513 - DNA, 20 bp, homo sapiens
  miR-130a-3p|0|-2
cagtgcaatgttaaaagggc

SEQ ID NO: 514 - DNA, 19 bp, homo sapiens
  miR-130a-3p|0|-3
cagtgcaatgttaaaaggg

SEQ ID NO: 515 - DNA, 23 bp, homo sapiens
  miR-130a-3p|-1|0
gcagtgcaatgttaaaagggcat

SEQ ID NO: 516 - DNA, 22 bp, homo sapiens
  miR-132-3p|0|0
taacagtctacagccatggtcg

SEQ ID NO: 517 - DNA, 21 bp, homo sapiens
  miR-132-3p|0|-1
taacagtctacagccatggtc

SEQ ID NO: 518 - DNA, 23 bp, homo sapiens
  miR-132-3p|0|1
taacagtctacagccatggtcgc

SEQ ID NO: 519 - DNA, 20 bp, homo sapiens
  miR-132-3p|0|-2
taacagtctacagccatggt

SEQ ID NO: 520 - DNA, 24 bp, homo sapiens
  miR-132-3p|0|2
taacagtctacagccatggtcgcc

SEQ ID NO: 521 - DNA, 21 bp, homo sapiens
  miR-132-3p|1|0
aacagtctacagccatggtcg

SEQ ID NO: 522 - DNA, 22 bp, homo sapiens
  miR-132-3p|1|1
aacagtctacagccatggtcgc

SEQ ID NO: 523 - DNA, 21 bp, homo sapiens
  miR-132-3p|2|1
acagtctacagccatggtcgc

SEQ ID NO: 524 - DNA, 24 bp, homo sapiens
  miR-138-5p|0|1
agctggtgttgtgaatcaggccga

SEQ ID NO: 525 - DNA, 22 bp, homo sapiens
  miR-140-5p|0|0
cagtggttttaccctatggtag

SEQ ID NO: 526 - DNA, 21 bp, homo sapiens
  miR-140-5p|0|-1
cagtggttttaccctatggta

SEQ ID NO: 527 - DNA, 23 bp, homo sapiens
  miR-140-5p|0|1
cagtggttttaccctatggtagg

SEQ ID NO: 528 - DNA, 22 bp, homo sapiens
  miR-142-5p|-2|-1
cccataaagtagaaagcactac

SEQ ID NO: 529 - DNA, 20 bp, homo sapiens
  miR-142-5p|-2|-3
cccataaagtagaaagcact

SEQ ID NO: 530 - DNA, 23 bp, homo sapiens
  miR-142-3p|0|0
tgtagtgtttcctactttatgga

SEQ ID NO: 531 - DNA, 22 bp, homo sapiens
  miR-142-3p|0|-1
tgtagtgtttcctactttatgg

SEQ ID NO: 532 - DNA, 22 bp, homo sapiens
  miR-142-3p|1|0
gtagtgtttcctactttatgga

SEQ ID NO: 533 - DNA, 21 bp, homo sapiens
  miR-142-3p|1|-1
gtagtgtttcctactttatgg

SEQ ID NO: 534 - DNA, 23 bp, homo sapiens
  miR-142-3p|1|1
gtagtgtttcctactttatggat

SEQ ID NO: 535 - DNA, 21 bp, homo sapiens
  miR-143-3p|0|0
tgagatgaagcactgtagctc

SEQ ID NO: 536 - DNA, 20 bp, homo sapiens
  miR-143-3p|0|-1
tgagatgaagcactgtagct

SEQ ID NO: 537 - DNA, 22 bp, homo sapiens
  miR-143-3p|0|1
tgagatgaagcactgtagctca

SEQ ID NO: 538 - DNA, 19 bp, homo sapiens
  miR-143-3p|0|-2
tgagatgaagcactgtagc

SEQ ID NO: 539 - DNA, 23 bp, homo sapiens
  miR-143-3p|0|2
tgagatgaagcactgtagctcag

SEQ ID NO: 540 - DNA, 18 bp, homo sapiens
  miR-143-3p|0|-3
tgagatgaagcactgtag

SEQ ID NO: 541 - DNA, 24 bp, homo sapiens
  miR-143-3p|0|3
tgagatgaagcactgtagctcagg

SEQ ID NO: 542 - DNA, 22 bp, homo sapiens
  miR-143-3p|-1|0
ctgagatgaagcactgtagctc

SEQ ID NO: 543 - DNA, 21 bp, homo sapiens
  miR-143-3p|-1|-1
ctgagatgaagcactgtagct

SEQ ID NO: 544 - DNA, 23 bp, homo sapiens
  miR-143-3p|-1|1
ctgagatgaagcactgtagctca

SEQ ID NO: 545 - DNA, 20 bp, homo sapiens
  miR-143-3p|-1|-2
ctgagatgaagcactgtagc

SEQ ID NO: 546 - DNA, 19 bp, homo sapiens
  miR-143-3p|-1|-3
ctgagatgaagcactgtag

SEQ ID NO: 547 - DNA, 19 bp, homo sapiens
  miR-143-3p|3|1
gatgaagcactgtagctca

SEQ ID NO: 548 - DNA, 23 bp, homo sapiens
  miR-145-5p|0|0
gtccagttttcccaggaatccct

SEQ ID NO: 549 - DNA, 22 bp, homo sapiens
  miR-145-5p|0|-1
gtccagttttcccaggaatccc

SEQ ID NO: 550 - DNA, 24 bp, homo sapiens
  miR-145-5p|0|1
gtccagttttcccaggaatccctt

SEQ ID NO: 551 - DNA, 21 bp, homo sapiens
  miR-145-5p|0|-2
gtccagttttcccaggaatcc

SEQ ID NO: 552 - DNA, 20 bp, homo sapiens
  miR-145-5p|0|-3
gtccagttttcccaggaatc

SEQ ID NO: 553 - DNA, 19 bp, homo sapiens
  miR-145-5p|0|-4
gtccagttttcccaggaat

SEQ ID NO: 554 - DNA, 21 bp, homo sapiens
  miR-152-3p|0|0
tcagtgcatgacagaacttgg

SEQ ID NO: 555 - DNA, 22 bp, homo sapiens
  miR-152-3p|0|1
tcagtgcatgacagaacttggg

SEQ ID NO: 556 - DNA, 23 bp, homo sapiens
  miR-152-3p|0|2
tcagtgcatgacagaacttgggc

SEQ ID NO: 557 - DNA, 23 bp, homo sapiens
  miR-191-5p|0|0
caacggaatcccaaaagcagctg

SEQ ID NO: 558 - DNA, 22 bp, homo sapiens
  miR-191-5p|0|-1
caacggaatcccaaaagcagct

SEQ ID NO: 559 - DNA, 24 bp, homo sapiens
  miR-191-5p|0|1
caacggaatcccaaaagcagctgt

SEQ ID NO: 560 - DNA, 21 bp, homo sapiens
  miR-191-5p|0|-2
caacggaatcccaaaagcagc

SEQ ID NO: 561 - DNA, 20 bp, homo sapiens
  miR-191-5p|0|-3
caacggaatcccaaaagcag

SEQ ID NO: 562 - DNA, 26 bp, homo sapiens
  miR-191-5p|0|3
caacggaatcccaaaagcagctgttg

SEQ ID NO: 563 - DNA, 19 bp, homo sapiens
  miR-191-5p|0|-4
caacggaatcccaaaagca

SEQ ID NO: 564 - DNA, 22 bp, homo sapiens
  miR-191-5p|1|0
aacggaatcccaaaagcagctg

SEQ ID NO: 565 - DNA, 21 bp, homo sapiens
  miR-191-5p|1|-1
aacggaatcccaaaagcagct

SEQ ID NO: 566 - DNA, 23 bp, homo sapiens
  miR-191-5p|1|1
aacggaatcccaaaagcagctgt

SEQ ID NO: 567 - DNA, 24 bp, homo sapiens
  miR-125a-5p|0|0
tccctgagaccctttaacctgtga

SEQ ID NO: 568 - DNA, 23 bp, homo sapiens
  miR-125a-5p|0|-1
tccctgagaccctttaacctgtg

SEQ ID NO: 569 - DNA, 25 bp, homo sapiens
  miR-125a-5p|0|1
tccctgagaccctttaacctgtgag

SEQ ID NO: 570 - DNA, 22 bp, homo sapiens
  miR-125a-5p|0|-2
tccctgagaccctttaacctgt

SEQ ID NO: 571 - DNA, 21 bp, homo sapiens
  miR-125a-5p|0|-3
tccctgagaccctttaacctg

SEQ ID NO: 572 - DNA, 20 bp, homo sapiens
  miR-125a-5p|0|-4
tccctgagaccctttaacct

SEQ ID NO: 573 - DNA, 19 bp, homo sapiens
  miR-125a-5p|0|-5
tccctgagaccctttaacc

SEQ ID NO: 574 - DNA, 21 bp, homo sapiens
  miR-126-5p|0|0
cattattacttttggtacgcg

SEQ ID NO: 575 - DNA, 20 bp, homo sapiens
  miR-126-5p|0|-1
cattattacttttggtacgc

SEQ ID NO: 576 - DNA, 22 bp, homo sapiens
  miR-126-5p|0|1
cattattacttttggtacgcgc

SEQ ID NO: 577 - DNA, 22 bp, homo sapiens
  miR-126-3p|0|0
tcgtaccgtgagtaataatgcg

SEQ ID NO: 578 - DNA, 21 bp, homo sapiens
  miR-126-3p|0|-1
tcgtaccgtgagtaataatgc

SEQ ID NO: 579 - DNA, 23 bp, homo sapiens
  miR-126-3p|0|1
tcgtaccgtgagtaataatgcgc

SEQ ID NO: 580 - DNA, 20 bp, homo sapiens
  miR-126-3p|0|-2
tcgtaccgtgagtaataatg

SEQ ID NO: 581 - DNA, 23 bp, homo sapiens
  miR-126-3p|-1|0
ctcgtaccgtgagtaataatgcg

SEQ ID NO: 582 - DNA, 21 bp, homo sapiens
  miR-126-3p|1|0
cgtaccgtgagtaataatgcg

SEQ ID NO: 583 - DNA, 22 bp, homo sapiens
  miR-126-3p|-1|-1
ctcgtaccgtgagtaataatgc

SEQ ID NO: 584 - DNA, 20 bp, homo sapiens
  miR-126-3p|1|-1
cgtaccgtgagtaataatgc

SEQ ID NO: 585 - DNA, 22 bp, homo sapiens
  miR-126-3p|1|1
cgtaccgtgagtaataatgcgc

SEQ ID NO: 586 - DNA, 22 bp, homo sapiens
  miR-127-3p|0|0
tcggatccgtctgagcttggct

SEQ ID NO: 587 - DNA, 21 bp, homo sapiens
  miR-127-3p|0|-1
tcggatccgtctgagcttggc

SEQ ID NO: 588 - DNA, 23 bp, homo sapiens
  miR-127-3p|0|1
tcggatccgtctgagcttggctg

SEQ ID NO: 589 - DNA, 20 bp, homo sapiens
  miR-127-3p|0|-2
tcggatccgtctgagcttgg

SEQ ID NO: 590 - DNA, 24 bp, homo sapiens
  miR-127-3p|0|2
tcggatccgtctgagcttggctgg

SEQ ID NO: 591 - DNA, 22 bp, homo sapiens
  miR-127-3p|-1|-1
atcggatccgtctgagcttggc

SEQ ID NO: 592 - DNA, 22 bp, homo sapiens
  miR-134-5p|0|0
tgtgactggttgaccagagggg

SEQ ID NO: 593 - DNA, 21 bp, homo sapiens
  miR-134-5p|0|-1
tgtgactggttgaccagaggg

SEQ ID NO: 594 - DNA, 23 bp, homo sapiens
  miR-134-5p|0|1
tgtgactggttgaccagaggggc

SEQ ID NO: 595 - DNA, 20 bp, homo sapiens
  miR-134-5p|0|-2
tgtgactggttgaccagagg

SEQ ID NO: 596 - DNA, 22 bp, homo sapiens
  miR-146a-5p|0|0
tgagaactgaattccatgggtt

SEQ ID NO: 597 - DNA, 21 bp, homo sapiens
  miR-146a-5p|0|-1
tgagaactgaattccatgggt

SEQ ID NO: 598 - DNA, 23 bp, homo sapiens
  miR-146a-5p|0|1
tgagaactgaattccatgggttg

SEQ ID NO: 599 - DNA, 20 bp, homo sapiens
  miR-146a-5p|0|-2
tgagaactgaattccatggg

SEQ ID NO: 600 - DNA, 24 bp, homo sapiens
  miR-146a-5p|0|2
tgagaactgaattccatgggttgt

SEQ ID NO: 601 - DNA, 19 bp, homo sapiens
  miR-146a-5p|0|-3
tgagaactgaattccatgg

SEQ ID NO: 602 - DNA, 25 bp, homo sapiens
  miR-146a-5p|0|3
tgagaactgaattccatgggttgtg

SEQ ID NO: 603 - DNA, 26 bp, homo sapiens
  miR-146a-5p|0|4
tgagaactgaattccatgggttgtgt

SEQ ID NO: 604 - DNA, 23 bp, homo sapiens
  miR-146a-5p|-1|0
ttgagaactgaattccatgggtt

SEQ ID NO: 605 - DNA, 21 bp, homo sapiens
  miR-146a-5p|1|0
gagaactgaattccatgggtt

SEQ ID NO: 606 - DNA, 22 bp, homo sapiens
  miR-146a-5p|-1|-1
ttgagaactgaattccatgggt

SEQ ID NO: 607 - DNA, 24 bp, homo sapiens
  miR-146a-5p|-1|1
ttgagaactgaattccatgggttg

SEQ ID NO: 608 - DNA, 20 bp, homo sapiens
  miR-146a-5p|1|-1
gagaactgaattccatgggt

SEQ ID NO: 609 - DNA, 22 bp, homo sapiens
  miR-146a-5p|1|1
gagaactgaattccatgggttg

SEQ ID NO: 610 - DNA, 21 bp, homo sapiens
  miR-146a-5p|-1|-2
ttgagaactgaattccatggg

SEQ ID NO: 611 - DNA, 23 bp, homo sapiens
  miR-146a-5p|1|2
gagaactgaattccatgggttgt

SEQ ID NO: 612 - DNA, 20 bp, homo sapiens
  miR-146a-5p|2|0
agaactgaattccatgggtt

SEQ ID NO: 613 - DNA, 21 bp, homo sapiens
  miR-146a-5p|2|1
agaactgaattccatgggttg

SEQ ID NO: 614 - DNA, 22 bp, homo sapiens
  miR-146a-5p|2|2
agaactgaattccatgggttgt

SEQ ID NO: 615 - DNA, 23 bp, homo sapiens
  miR-146a-5p|2|3
agaactgaattccatgggttgtg

SEQ ID NO: 616 - DNA, 24 bp, homo sapiens
  miR-146a-5p|2|4
agaactgaattccatgggttgtgt

SEQ ID NO: 617 - DNA, 19 bp, homo sapiens
  miR-146a-5p|3|0
gaactgaattccatgggtt

SEQ ID NO: 618 - DNA, 23 bp, homo sapiens
  miR-149-5p|0|0
tctggctccgtgtcttcactccc

SEQ ID NO: 619 - DNA, 22 bp, homo sapiens
  miR-149-5p|0|-1
tctggctccgtgtcttcactcc

SEQ ID NO: 620 - DNA, 24 bp, homo sapiens
  miR-149-5p|0|1
tctggctccgtgtcttcactcccg

SEQ ID NO: 621 - DNA, 21 bp, homo sapiens
  miR-149-5p|0|-2
tctggctccgtgtcttcactc

SEQ ID NO: 622 - DNA, 20 bp, homo sapiens
  miR-149-5p|0|-3
tctggctccgtgtcttcact

SEQ ID NO: 623 - DNA, 22 bp, homo sapiens
  miR-150-5p|0|0
tctcccaacccttgtaccagtg

SEQ ID NO: 624 - DNA, 21 bp, homo sapiens
  miR-150-5p|0|-1
tctcccaacccttgtaccagt

SEQ ID NO: 625 - DNA, 23 bp, homo sapiens
  miR-150-5p|0|1
tctcccaacccttgtaccagtgc

SEQ ID NO: 626 - DNA, 20 bp, homo sapiens
  miR-150-5p|0|-2
tctcccaacccttgtaccag

SEQ ID NO: 627 - DNA, 23 bp, homo sapiens
  miR-150-5p|-2|-1
tgtctcccaacccttgtaccagt

SEQ ID NO: 628 - DNA, 22 bp, homo sapiens
  miR-150-5p|-2|-2
tgtctcccaacccttgtaccag

SEQ ID NO: 629 - DNA, 22 bp, homo sapiens
  miR-184|0|0
tggacggagaactgataagggt

SEQ ID NO: 630 - DNA, 21 bp, homo sapiens
  miR-184|0|-1
tggacggagaactgataaggg

SEQ ID NO: 631 - DNA, 23 bp, homo sapiens
  miR-184|0|1
tggacggagaactgataagggta

SEQ ID NO: 632 - DNA, 20 bp, homo sapiens
  miR-184|0|-2
tggacggagaactgataagg

SEQ ID NO: 633 - DNA, 22 bp, homo sapiens
  miR-185-5p|0|0
tggagagaaaggcagttcctga

SEQ ID NO: 634 - DNA, 21 bp, homo sapiens
  miR-185-5p|0|-1
tggagagaaaggcagttcctg

SEQ ID NO: 635 - DNA, 23 bp, homo sapiens
  miR-185-5p|0|1
tggagagaaaggcagttcctgat

SEQ ID NO: 636 - DNA, 24 bp, homo sapiens
  miR-185-5p|0|2
tggagagaaaggcagttcctgatg

SEQ ID NO: 637 - DNA, 22 bp, homo sapiens
  miR-186-5p|0|0
caaagaattctccttttgggct

SEQ ID NO: 638 - DNA, 21 bp, homo sapiens
  miR-186-5p|0|-1
caaagaattctccttttgggc

SEQ ID NO: 639 - DNA, 23 bp, homo sapiens
  miR-186-5p|0|1
caaagaattctccttttgggctt

SEQ ID NO: 640 - DNA, 20 bp, homo sapiens
  miR-186-5p|0|-2
caaagaattctccttttggg

SEQ ID NO: 641 - DNA, 24 bp, homo sapiens
  miR-186-5p|0|2
caaagaattctccttttgggcttt

SEQ ID NO: 642 - DNA, 22 bp, homo sapiens
  miR-186-5p|1|1
aaagaattctccttttgggctt

SEQ ID NO: 643 - DNA, 22 bp, homo sapiens
  miR-188-5p|0|1
catcccttgcatggtggagggt

SEQ ID NO: 644 - DNA, 23 bp, homo sapiens
  miR-188-5p|0|2
catcccttgcatggtggagggtg

SEQ ID NO: 645 - DNA, 21 bp, homo sapiens
  miR-190a-5p|0|-1
tgatatgtttgatatattagg

SEQ ID NO: 646 - DNA, 21 bp, homo sapiens
  miR-193a-3p|0|-1
aactggcctacaaagtcccag

SEQ ID NO: 647 - DNA, 22 bp, homo sapiens
  miR-194-5p|0|0
tgtaacagcaactccatgtgga

SEQ ID NO: 648 - DNA, 21 bp, homo sapiens
  miR-194-5p|0|-1
tgtaacagcaactccatgtgg

SEQ ID NO: 649 - DNA, 21 bp, homo sapiens
  miR-195-5p|0|0
tagcagcacagaaatattggc

SEQ ID NO: 650 - DNA, 20 bp, homo sapiens
  miR-195-5p|0|-1
tagcagcacagaaatattgg

SEQ ID NO: 651 - DNA, 22 bp, homo sapiens
  miR-195-5p|0|1
tagcagcacagaaatattggca

SEQ ID NO: 652 - DNA, 23 bp, homo sapiens
  miR-195-5p|0|2
tagcagcacagaaatattggcac

SEQ ID NO: 653 - DNA, 22 bp, homo sapiens
  miR-320a|0|0
aaaagctgggttgagagggcga

SEQ ID NO: 654 - DNA, 21 bp, homo sapiens
  miR-320a|0|-1
aaaagctgggttgagagggcg

SEQ ID NO: 655 - DNA, 23 bp, homo sapiens
  miR-320a|0|1
aaaagctgggttgagagggcgaa

SEQ ID NO: 656 - DNA, 24 bp, homo sapiens
  miR-320a|0|2
aaaagctgggttgagagggcgaaa

SEQ ID NO: 657 - DNA, 25 bp, homo sapiens
  miR-320a|0|3
aaaagctgggttgagagggcgaaaa

SEQ ID NO: 658 - DNA, 26 bp, homo sapiens
  miR-320a|0|4
aaaagctgggttgagagggcgaaaaa

SEQ ID NO: 659 - DNA, 23 bp, homo sapiens
  miR-320a|-1|0
gaaaagctgggttgagagggcga

SEQ ID NO: 660 - DNA, 21 bp, homo sapiens
  miR-320a|1|0
aaagctgggttgagagggcga

SEQ ID NO: 661 - DNA, 22 bp, homo sapiens
  miR-320a|-1|-1
gaaaagctgggttgagagggcg

SEQ ID NO: 662 - DNA, 24 bp, homo sapiens
  miR-320a|-1|1
gaaaagctgggttgagagggcgaa

SEQ ID NO: 663 - DNA, 20 bp, homo sapiens
  miR-320a|1|-1
aaagctgggttgagagggcg

SEQ ID NO: 664 - DNA, 22 bp, homo sapiens
  miR-320a|1|1
aaagctgggttgagagggcgaa

SEQ ID NO: 665 - DNA, 23 bp, homo sapiens
  miR-320a|1|2
aaagctgggttgagagggcgaaa

SEQ ID NO: 666 - DNA, 24 bp, homo sapiens
  miR-320a|1|3
aaagctgggttgagagggcgaaaa

SEQ ID NO: 667 - DNA, 21 bp, homo sapiens
  miR-320a|2|1
aagctgggttgagagggcgaa

SEQ ID NO: 668 - DNA, 22 bp, homo sapiens
  miR-320a|2|2
aagctgggttgagagggcgaaa

SEQ ID NO: 669 - DNA, 23 bp, homo sapiens
  miR-320a|2|3
aagctgggttgagagggcgaaaa

SEQ ID NO: 670 - DNA, 23 bp, homo sapiens
  miR-200c-3p|0|0
taatactgccgggtaatgatgga

SEQ ID NO: 671 - DNA, 22 bp, homo sapiens
  miR-200c-3p|0|-1
taatactgccgggtaatgatgg

SEQ ID NO: 672 - DNA, 23 bp, homo sapiens
  miR-155-5p|0|0
ttaatgctaatcgtgataggggt

SEQ ID NO: 673 - DNA, 22 bp, homo sapiens
  miR-155-5p|0|-1
ttaatgctaatcgtgatagggg

SEQ ID NO: 674 - DNA, 24 bp, homo sapiens
  miR-155-5p|0|1
ttaatgctaatcgtgataggggtt

SEQ ID NO: 675 - DNA, 21 bp, homo sapiens
  miR-155-5p|0|-2
ttaatgctaatcgtgataggg

SEQ ID NO: 676 - DNA, 25 bp, homo sapiens
  miR-155-5p|0|2
ttaatgctaatcgtgataggggttt

SEQ ID NO: 677 - DNA, 20 bp, homo sapiens
  miR-155-5p|0|-3
ttaatgctaatcgtgatagg

SEQ ID NO: 678 - DNA, 26 bp, homo sapiens
  miR-155-5p|0|3
ttaatgctaatcgtgataggggtttt

SEQ ID NO: 679 - DNA, 21 bp, homo sapiens
  6miR-106b-5p|0|0
taaagtgctgacagtgcagat

SEQ ID NO: 680 - DNA, 20 bp, homo sapiens
  6miR-106b-5p|0|-1
taaagtgctgacagtgcaga

SEQ ID NO: 681 - DNA, 22 bp, homo sapiens
  6miR-106b-5p|0|1
taaagtgctgacagtgcagata

SEQ ID NO: 682 - DNA, 19 bp, homo sapiens
  6miR-106b-5p|0|-2
taaagtgctgacagtgcag

SEQ ID NO: 683 - DNA, 23 bp, homo sapiens
  6miR-106b-5p|0|2
taaagtgctgacagtgcagatag

SEQ ID NO: 684 - DNA, 22 bp, homo sapiens
  6miR-29c-3p|0|0
tagcaccatttgaaatcggtta

SEQ ID NO: 685 - DNA, 21 bp, homo sapiens
  6miR-29c-3p|0|-1
tagcaccatttgaaatcggtt

SEQ ID NO: 686 - DNA, 23 bp, homo sapiens
  6miR-29c-3p|0|1
tagcaccatttgaaatcggttat

SEQ ID NO: 687 - DNA, 20 bp, homo sapiens
  6miR-29c-3p|0|-2
tagcaccatttgaaatcggt

SEQ ID NO: 688 - DNA, 24 bp, homo sapiens
  6miR-29c-3p|0|2
tagcaccatttgaaatcggttatg

SEQ ID NO: 689 - DNA, 19 bp, homo sapiens
  6miR-29c-3p|0|-3
tagcaccatttgaaatcgg

SEQ ID NO: 690 - DNA, 18 bp, homo sapiens
  6miR-29c-3p|0|-4
tagcaccatttgaaatcg

SEQ ID NO: 691 - DNA, 22 bp, homo sapiens
  6miR-29c-3p|-1|-1
ctagcaccatttgaaatcggtt

SEQ ID NO: 692 - DNA, 20 bp, homo sapiens
  6miR-29c-3p|-1|-3
ctagcaccatttgaaatcgg

SEQ ID NO: 693 - DNA, 23 bp, homo sapiens
  6miR-34c-5p|0|0
aggcagtgtagttagctgattgc

SEQ ID NO: 694 - DNA, 23 bp, homo sapiens
  6miR-301a-3p|0|0
cagtgcaatagtattgtcaaagc

SEQ ID NO: 695 - DNA, 22 bp, homo sapiens
  miR-99b-5p|0|0
cacccgtagaaccgaccttgcg

SEQ ID NO: 696 - DNA, 21 bp, homo sapiens
  miR-99b-5p|0|-1
cacccgtagaaccgaccttgc

SEQ ID NO: 697 - DNA, 23 bp, homo sapiens
  miR-99b-5p|0|1
cacccgtagaaccgaccttgcgg

SEQ ID NO: 698 - DNA, 20 bp, homo sapiens
  miR-99b-5p|0|-2
cacccgtagaaccgaccttg

SEQ ID NO: 699 - DNA, 24 bp, homo sapiens
  miR-99b-5p|0|2
cacccgtagaaccgaccttgcggg

SEQ ID NO: 700 - DNA, 19 bp, homo sapiens
  miR-99b-5p|0|-3
cacccgtagaaccgacctt

SEQ ID NO: 701 - DNA, 18 bp, homo sapiens
  miR-99b-5p|0|-4
cacccgtagaaccgacct

SEQ ID NO: 702 - DNA, 23 bp, homo sapiens
  miR-99b-5p|-1|0
ccacccgtagaaccgaccttgcg

SEQ ID NO: 703 - DNA, 21 bp, homo sapiens
  miR-99b-5p|1|0
acccgtagaaccgaccttgcg

SEQ ID NO: 704 - DNA, 22 bp, homo sapiens
  miR-99b-5p|-1|-1
ccacccgtagaaccgaccttgc

SEQ ID NO: 705 - DNA, 20 bp, homo sapiens
  miR-99b-5p|1|-1
acccgtagaaccgaccttgc

SEQ ID NO: 706 - DNA, 22 bp, homo sapiens
  miR-99b-5p|1|1
acccgtagaaccgaccttgcgg

SEQ ID NO: 707 - DNA, 21 bp, homo sapiens
  6miR-296-5p|0|0
agggccccccctcaatcctgt

SEQ ID NO: 708 - DNA, 22 bp, homo sapiens
  6miR-130b-3p|0|0
cagtgcaatgatgaaagggcat

SEQ ID NO: 709 - DNA, 22 bp, homo sapiens
  6miR-30e-5p|0|0
tgtaaacatccttgactggaag

SEQ ID NO: 710 - DNA, 21 bp, homo sapiens
  6miR-30e-5p|0|-1
tgtaaacatccttgactggaa

SEQ ID NO: 711 - DNA, 23 bp, homo sapiens
  6miR-30e-5p|0|1
tgtaaacatccttgactggaagc

SEQ ID NO: 712 - DNA, 20 bp, homo sapiens
  6miR-30e-5p|0|-2
tgtaaacatccttgactgga

SEQ ID NO: 713 - DNA, 24 bp, homo sapiens
  6miR-30e-5p|0|2
tgtaaacatccttgactggaagct

SEQ ID NO: 714 - DNA, 19 bp, homo sapiens
  6miR-30e-5p|0|-3
tgtaaacatccttgactgg

SEQ ID NO: 715 - DNA, 25 bp, homo sapiens
  6miR-30e-5p|0|3
tgtaaacatccttgactggaagctg

SEQ ID NO: 716 - DNA, 26 bp, homo sapiens
  6miR-30e-5p|0|4
tgtaaacatccttgactggaagctgt

SEQ ID NO: 717 - DNA, 21 bp, homo sapiens
  6miR-30e-5p|1|0
gtaaacatccttgactggaag

SEQ ID NO: 718 - DNA, 22 bp, homo sapiens
  6miR-30e-5p|1|1
gtaaacatccttgactggaagc

SEQ ID NO: 719 - DNA, 19 bp, homo sapiens
  6miR-30e-5p|1|-2
gtaaacatccttgactgga

SEQ ID NO: 720 - DNA, 23 bp, homo sapiens
  6miR-30e-5p|1|2
gtaaacatccttgactggaagct

SEQ ID NO: 721 - DNA, 18 bp, homo sapiens
  6miR-30e-5p|1|-3
gtaaacatccttgactgg

SEQ ID NO: 722 - DNA, 24 bp, homo sapiens
  6miR-30e-5p|1|3
gtaaacatccttgactggaagctg

SEQ ID NO: 723 - DNA, 25 bp, homo sapiens
  6miR-30e-5p|1|4
gtaaacatccttgactggaagctgt

SEQ ID NO: 724 - DNA, 22 bp, homo sapiens
  6miR-30e-3p|0|0
ctttcagtcggatgtttacagc

SEQ ID NO: 725 - DNA, 21 bp, homo sapiens
  6miR-30e-3p|0|-1
ctttcagtcggatgtttacag

SEQ ID NO: 726 - DNA, 23 bp, homo sapiens
  6miR-30e-3p|0|1
ctttcagtcggatgtttacagcg

SEQ ID NO: 727 - DNA, 20 bp, homo sapiens
  6miR-30e-3p|0|-2
ctttcagtcggatgtttaca

SEQ ID NO: 728 - DNA, 19 bp, homo sapiens
  6miR-30e-3p|0|-3
ctttcagtcggatgtttac

SEQ ID NO: 729 - DNA, 18 bp, homo sapiens
  6miR-30e-3p|0|-4
ctttcagtcggatgttta

SEQ ID NO: 730 - DNA, 23 bp, homo sapiens
  6miR-30e-3p|-1|0
gctttcagtcggatgtttacagc

SEQ ID NO: 731 - DNA, 21 bp, homo sapiens
  6miR-30e-3p|1|0
tttcagtcggatgtttacagc

SEQ ID NO: 732 - DNA, 22 bp, homo sapiens
  6miR-30e-3p|-1|-1
gctttcagtcggatgtttacag

SEQ ID NO: 733 - DNA, 20 bp, homo sapiens
  6miR-30e-3p|1|-1
tttcagtcggatgtttacag

SEQ ID NO: 734 - DNA, 22 bp, homo sapiens
  6miR-30e-3p|1|1
tttcagtcggatgtttacagcg

SEQ ID NO: 735 - DNA, 21 bp, homo sapiens
  6miR-30e-3p|-1|-2
gctttcagtcggatgtttaca

SEQ ID NO: 736 - DNA, 19 bp, homo sapiens
  6miR-30e-3p|1|-2
tttcagtcggatgtttaca

SEQ ID NO: 737 - DNA, 18 bp, homo sapiens
  6miR-30e-3p|1|-3
tttcagtcggatgtttac

SEQ ID NO: 738 - DNA, 20 bp, homo sapiens
  6miR-30e-3p|2|0
ttcagtcggatgtttacagc

SEQ ID NO: 739 - DNA, 22 bp, homo sapiens
  miR-361-5p|0|0
ttatcagaatctccaggggtac

SEQ ID NO: 740 - DNA, 21 bp, homo sapiens
  miR-361-5p|0|-1
ttatcagaatctccaggggta

SEQ ID NO: 741 - DNA, 23 bp, homo sapiens
  miR-361-5p|0|1
ttatcagaatctccaggggtact

SEQ ID NO: 742 - DNA, 20 bp, homo sapiens
  miR-361-5p|0|-2
ttatcagaatctccaggggt

SEQ ID NO: 743 - DNA, 24 bp, homo sapiens
  miR-361-5p|0|2
ttatcagaatctccaggggtactt

SEQ ID NO: 744 - DNA, 19 bp, homo sapiens
  miR-361-5p|0|-3
ttatcagaatctccagggg

SEQ ID NO: 745 - DNA, 24 bp, homo sapiens
  miR-362-5p|0|0
aatccttggaacctaggtgtgagt

SEQ ID NO: 746 - DNA, 23 bp, homo sapiens
  miR-362-5p|0|-1
aatccttggaacctaggtgtgag

SEQ ID NO: 747 - DNA, 25 bp, homo sapiens
  miR-362-5p|0|1
aatccttggaacctaggtgtgagtg

SEQ ID NO: 748 - DNA, 22 bp, homo sapiens
  miR-362-5p|0|-2
aatccttggaacctaggtgtga

SEQ ID NO: 749 - DNA, 26 bp, homo sapiens
  miR-362-5p|0|2
aatccttggaacctaggtgtgagtgc

SEQ ID NO: 750 - DNA, 22 bp, homo sapiens
  miR-363-3p|0|0
aattgcacggtatccatctgta

SEQ ID NO: 751 - DNA, 21 bp, homo sapiens
  miR-363-3p|0|-1
aattgcacggtatccatctgt

SEQ ID NO: 752 - DNA, 23 bp, homo sapiens
  miR-363-3p|0|1
aattgcacggtatccatctgtaa

SEQ ID NO: 753 - DNA, 22 bp, homo sapiens
  miR-363-3p|1|1
attgcacggtatccatctgtaa

SEQ ID NO: 754 - DNA, 21 bp, homo sapiens
  miR-365a-3p|0|-1
taatgcccctaaaaatcctta

SEQ ID NO: 755 - DNA, 22 bp, homo sapiens
  miR-374a-5p|0|0
ttataatacaacctgataagtg

SEQ ID NO: 756 - DNA, 21 bp, homo sapiens
  miR-374a-5p|0|-1
ttataatacaacctgataagt

SEQ ID NO: 757 - DNA, 23 bp, homo sapiens
  miR-374a-5p|0|1
ttataatacaacctgataagtgt

SEQ ID NO: 758 - DNA, 20 bp, homo sapiens
  miR-374a-5p|0|-2
ttataatacaacctgataag

SEQ ID NO: 759 - DNA, 22 bp, homo sapiens
  miR-375|0|0
tttgttcgttcggctcgcgtga

SEQ ID NO: 760 - DNA, 22 bp, homo sapiens
  miR-378a-5p|0|0
ctcctgactccaggtcctgtgt

SEQ ID NO: 761 - DNA, 21 bp, homo sapiens
  miR-378a-5p|0|-1
ctcctgactccaggtcctgtg

SEQ ID NO: 762 - DNA, 23 bp, homo sapiens
  miR-378a-5p|0|1
ctcctgactccaggtcctgtgtg

SEQ ID NO: 763 - DNA, 20 bp, homo sapiens
  miR-378a-5p|0|-2
ctcctgactccaggtcctgt

SEQ ID NO: 764 - DNA, 24 bp, homo sapiens
  miR-378a-5p|0|2
ctcctgactccaggtcctgtgtgt

SEQ ID NO: 765 - DNA, 21 bp, homo sapiens
  miR-378a-5p|1|0
tcctgactccaggtcctgtgt

SEQ ID NO: 766 - DNA, 22 bp, homo sapiens
  miR-378a-5p|-1|-1
gctcctgactccaggtcctgtg

SEQ ID NO: 767 - DNA, 20 bp, homo sapiens
  miR-378a-5p|1|-1
tcctgactccaggtcctgtg

SEQ ID NO: 768 - DNA, 22 bp, homo sapiens
  miR-378a-5p|1|1
tcctgactccaggtcctgtgtg

SEQ ID NO: 769 - DNA, 23 bp, homo sapiens
  miR-378a-5p|1|2
tcctgactccaggtcctgtgtgt

SEQ ID NO: 770 - DNA, 22 bp, homo sapiens
  miR-378a-5p|2|2
cctgactccaggtcctgtgtgt

SEQ ID NO: 771 - DNA, 22 bp, homo sapiens
  miR-378a-3p|0|1
actggacttggagtcagaaggc

SEQ ID NO: 772 - DNA, 23 bp, homo sapiens
  miR-378a-3p|-1|1
cactggacttggagtcagaaggc

SEQ ID NO: 773 - DNA, 23 bp, homo sapiens
  miR-378a-3p|1|3
ctggacttggagtcagaaggcct

SEQ ID NO: 774 - DNA, 21 bp, homo sapiens
  miR-379-5p|0|0
tggtagactatggaacgtagg

SEQ ID NO: 775 - DNA, 20 bp, homo sapiens
  miR-379-5p|0|-1
tggtagactatggaacgtag

SEQ ID NO: 776 - DNA, 22 bp, homo sapiens
  miR-379-5p|0|1
tggtagactatggaacgtaggc

SEQ ID NO: 777 - DNA, 22 bp, homo sapiens
  miR-381-3p|0|0
tatacaagggcaagctctctgt

SEQ ID NO: 778 - DNA, 21 bp, homo sapiens
  miR-381-3p|0|-1
tatacaagggcaagctctctg

SEQ ID NO: 779 - DNA, 22 bp, homo sapiens
  miR-382-5p|0|0
gaagttgttcgtggtggattcg

SEQ ID NO: 780 - DNA, 22 bp, homo sapiens
  miR-383-5p|0|0
agatcagaaggtgattgtggct

SEQ ID NO: 781 - DNA, 23 bp, homo sapiens
  miR-383-5p|-1|0
cagatcagaaggtgattgtggct

SEQ ID NO: 782 - DNA, 22 bp, homo sapiens
  miR-383-5p|-1|-1
cagatcagaaggtgattgtggc

SEQ ID NO: 783 - DNA, 21 bp, homo sapiens
  miR-383-5p|-1|-2
cagatcagaaggtgattgtgg

SEQ ID NO: 784 - DNA, 22 bp, homo sapiens
  miR-340-3p|0|0
tccgtctcagttactttatagc

SEQ ID NO: 785 - DNA, 21 bp, homo sapiens
  miR-340-3p|0|-1
tccgtctcagttactttatag

SEQ ID NO: 786 - DNA, 23 bp, homo sapiens
  miR-340-3p|0|1
tccgtctcagttactttatagcc

SEQ ID NO: 787 - DNA, 22 bp, homo sapiens
  miR-328-3p|0|0
ctggccctctctgcccttccgt

SEQ ID NO: 788 - DNA, 21 bp, homo sapiens
  miR-328-3p|0|-1
ctggccctctctgcccttccg

SEQ ID NO: 789 - DNA, 23 bp, homo sapiens
  miR-328-3p|0|1
ctggccctctctgcccttccgtc

SEQ ID NO: 790 - DNA, 20 bp, homo sapiens
  miR-328-3p|0|-2
ctggccctctctgcccttcc

SEQ ID NO: 791 - DNA, 23 bp, homo sapiens
  miR-342-3p|0|0
tctcacacagaaatcgcacccgt

SEQ ID NO: 792 - DNA, 22 bp, homo sapiens
  miR-342-3p|0|-1
tctcacacagaaatcgcacccg

SEQ ID NO: 793 - DNA, 24 bp, homo sapiens
  miR-342-3p|0|1
tctcacacagaaatcgcacccgtc

SEQ ID NO: 794 - DNA, 21 bp, homo sapiens
  miR-342-3p|0|-2
tctcacacagaaatcgcaccc

SEQ ID NO: 795 - DNA, 25 bp, homo sapiens
  miR-342-3p|0|2
tctcacacagaaatcgcacccgtca

SEQ ID NO: 796 - DNA, 22 bp, homo sapiens
  miR-342-3p|2|1
tcacacagaaatcgcacccgtc

SEQ ID NO: 797 - DNA, 23 bp, homo sapiens
  miR-342-3p|2|2
tcacacagaaatcgcacccgtca

SEQ ID NO: 798 - DNA, 24 bp, homo sapiens
  miR-342-3p|2|3
tcacacagaaatcgcacccgtcac

SEQ ID NO: 799 - DNA, 20 bp, homo sapiens
  miR-326|0|0
cctctgggcccttcctccag

SEQ ID NO: 800 - DNA, 21 bp, homo sapiens
  miR-326|0|1
cctctgggcccttcctccagc

SEQ ID NO: 801 - DNA, 22 bp, homo sapiens
  miR-151a-3p|0|1
ctagactgaagctccttgagga

SEQ ID NO: 802 - DNA, 23 bp, homo sapiens
  miR-151a-3p|0|2
ctagactgaagctccttgaggac

SEQ ID NO: 803 - DNA, 24 bp, homo sapiens
  miR-151a-3p|0|3
ctagactgaagctccttgaggaca

SEQ ID NO: 804 - DNA, 23 bp, homo sapiens
  miR-151a-3p|-1|1
actagactgaagctccttgagga

SEQ ID NO: 805 - DNA, 21 bp, homo sapiens
  miR-151a-3p|1|1
tagactgaagctccttgagga

SEQ ID NO: 806 - DNA, 22 bp, homo sapiens
  miR-151a-3p|1|2
tagactgaagctccttgaggac

SEQ ID NO: 807 - DNA, 23 bp, homo sapiens
  miR-151a-3p|1|3
tagactgaagctccttgaggaca

SEQ ID NO: 808 - DNA, 23 bp, homo sapiens
  miR-151a-3p|-2|0
tactagactgaagctccttgagg

SEQ ID NO: 809 - DNA, 22 bp, homo sapiens
  miR-151a-3p|-2|-1
tactagactgaagctccttgag

SEQ ID NO: 810 - DNA, 24 bp, homo sapiens
  miR-151a-3p|-2|1
tactagactgaagctccttgagga

SEQ ID NO: 811 - DNA, 21 bp, homo sapiens
  miR-151a-3p|-2|-2
tactagactgaagctccttga

SEQ ID NO: 812 - DNA, 20 bp, homo sapiens
  miR-151a-3p|-2|-3
tactagactgaagctccttg

SEQ ID NO: 813 - DNA, 22 bp, homo sapiens
  miR-135b-5p|0|-1
tatggcttttcattcctatgtg

SEQ ID NO: 814 - DNA, 22 bp, homo sapiens
  miR-148b-3p|0|0
tcagtgcatcacagaactttgt

SEQ ID NO: 815 - DNA, 21 bp, homo sapiens
  miR-148b-3p|0|-1
tcagtgcatcacagaactttg

SEQ ID NO: 816 - DNA, 23 bp, homo sapiens
  miR-148b-3p|0|1
tcagtgcatcacagaactttgtc

SEQ ID NO: 817 - DNA, 24 bp, homo sapiens
  miR-148b-3p|0|2
tcagtgcatcacagaactttgtct

SEQ ID NO: 818 - DNA, 21 bp, homo sapiens
  miR-331-3p|0|0
gcccctgggcctatcctagaa

SEQ ID NO: 819 - DNA, 20 bp, homo sapiens
  miR-331-3p|0|-1
gcccctgggcctatcctaga

SEQ ID NO: 820 - DNA, 22 bp, homo sapiens
  miR-331-3p|0|1
gcccctgggcctatcctagaac

SEQ ID NO: 821 - DNA, 23 bp, homo sapiens
  miR-324-5p|0|0
cgcatcccctagggcattggtgt

SEQ ID NO: 822 - DNA, 22 bp, homo sapiens
  miR-324-5p|0|-1
cgcatcccctagggcattggtg

SEQ ID NO: 823 - DNA, 24 bp, homo sapiens
  miR-324-5p|0|1
cgcatcccctagggcattggtgta

SEQ ID NO: 824 - DNA, 21 bp, homo sapiens
  miR-324-5p|0|-2
cgcatcccctagggcattggt

SEQ ID NO: 825 - DNA, 20 bp, homo sapiens
  miR-324-3p|0|0
actgccccaggtgctgctgg

SEQ ID NO: 826 - DNA, 21 bp, homo sapiens
  miR-324-3p|-1|0
cactgccccaggtgctgctgg

SEQ ID NO: 827 - DNA, 22 bp, homo sapiens
  miR-324-3p|-2|0
ccactgccccaggtgctgctgg

SEQ ID NO: 828 - DNA, 21 bp, homo sapiens
  miR-324-3p|-2|-1
ccactgccccaggtgctgctg

SEQ ID NO: 829 - DNA, 23 bp, homo sapiens
  miR-324-3p|-2|1
ccactgccccaggtgctgctggg

SEQ ID NO: 830 - DNA, 22 bp, homo sapiens
  miR-338-3p|0|0
tccagcatcagtgattttgttg

SEQ ID NO: 831 - DNA, 21 bp, homo sapiens
  miR-338-3p|0|-1
tccagcatcagtgattttgtt

SEQ ID NO: 832 - DNA, 23 bp, homo sapiens
  miR-338-3p|0|1
tccagcatcagtgattttgttga

SEQ ID NO: 833 - DNA, 20 bp, homo sapiens
  miR-338-3p|0|-2
tccagcatcagtgattttgt

SEQ ID NO: 834 - DNA, 24 bp, homo sapiens
  miR-338-3p|0|2
tccagcatcagtgattttgttgaa

SEQ ID NO: 835 - DNA, 19 bp, homo sapiens
  miR-338-3p|0|-3
tccagcatcagtgattttg

SEQ ID NO: 836 - DNA, 23 bp, homo sapiens
  miR-338-3p|-1|0
ctccagcatcagtgattttgttg

SEQ ID NO: 837 - DNA, 21 bp, homo sapiens
  miR-338-3p|1|0
ccagcatcagtgattttgttg

SEQ ID NO: 838 - DNA, 22 bp, homo sapiens
  miR-338-3p|-1|-1
ctccagcatcagtgattttgtt

SEQ ID NO: 839 - DNA, 22 bp, homo sapiens
  miR-338-3p|1|1
ccagcatcagtgattttgttga

SEQ ID NO: 840 - DNA, 21 bp, homo sapiens
  miR-338-3p|-1|-2
ctccagcatcagtgattttgt

SEQ ID NO: 841 - DNA, 23 bp, homo sapiens
  7miR-339-5p|0|0
tccctgtcctccaggagctcacg

SEQ ID NO: 842 - DNA, 24 bp, homo sapiens
  7miR-339-5p|0|1
tccctgtcctccaggagctcacgt

SEQ ID NO: 843 - DNA, 22 bp, homo sapiens
  7miR-335-5p|0|-1
tcaagagcaataacgaaaaatg

SEQ ID NO: 844 - DNA, 22 bp, homo sapiens
  7miR-345-5p|0|0
gctgactcctagtccagggctc

SEQ ID NO: 845 - DNA, 21 bp, homo sapiens
  7miR-345-5p|0|-1
gctgactcctagtccagggct

SEQ ID NO: 846 - DNA, 23 bp, homo sapiens
  7miR-345-5p|0|1
gctgactcctagtccagggctcg

SEQ ID NO: 847 - DNA, 23 bp, homo sapiens
  7miR-346|0|0
tgtctgcccgcatgcctgcctct

SEQ ID NO: 848 - DNA, 22 bp, homo sapiens
  10miR-196b-5p|0|0
taggtagtttcctgttgttggg

SEQ ID NO: 849 - DNA, 21 bp, homo sapiens
  10miR-196b-5p|0|-1
taggtagtttcctgttgttgg

SEQ ID NO: 850 - DNA, 23 bp, homo sapiens
  miR-423-3p|0|0
agctcggtctgaggcccctcagt

SEQ ID NO: 851 - DNA, 22 bp, homo sapiens
  miR-423-3p|0|-1
agctcggtctgaggcccctcag

SEQ ID NO: 852 - DNA, 24 bp, homo sapiens
  miR-423-3p|0|1
agctcggtctgaggcccctcagtc

SEQ ID NO: 853 - DNA, 21 bp, homo sapiens
  miR-423-3p|0|-2
agctcggtctgaggcccctca

SEQ ID NO: 854 - DNA, 25 bp, homo sapiens
  miR-423-3p|0|2
agctcggtctgaggcccctcagtct

SEQ ID NO: 855 - DNA, 20 bp, homo sapiens
  miR-423-3p|0|-3
agctcggtctgaggcccctc

SEQ ID NO: 856 - DNA, 24 bp, homo sapiens
  miR-423-3p|-1|0
aagctcggtctgaggcccctcagt

SEQ ID NO: 857 - DNA, 22 bp, homo sapiens
  miR-423-3p|1|0
gctcggtctgaggcccctcagt

SEQ ID NO: 858 - DNA, 23 bp, homo sapiens
  miR-423-3p|-1|-1
aagctcggtctgaggcccctcag

SEQ ID NO: 859 - DNA, 25 bp, homo sapiens
  miR-423-3p|-1|1
aagctcggtctgaggcccctcagtc

SEQ ID NO: 860 - DNA, 22 bp, homo sapiens
  miR-423-3p|-1|-2
aagctcggtctgaggcccctca

SEQ ID NO: 861 - DNA, 21 bp, homo sapiens
  miR-423-3p|-1|-3
aagctcggtctgaggcccctc

SEQ ID NO: 862 - DNA, 22 bp, homo sapiens
  miR-424-5p|0|0
cagcagcaattcatgttttgaa

SEQ ID NO: 863 - DNA, 21 bp, homo sapiens
  miR-424-5p|0|-1
cagcagcaattcatgttttga

SEQ ID NO: 864 - DNA, 23 bp, homo sapiens
  miR-424-5p|0|1
cagcagcaattcatgttttgaag

SEQ ID NO: 865 - DNA, 20 bp, homo sapiens
  miR-424-5p|0|-2
cagcagcaattcatgttttg

SEQ ID NO: 866 - DNA, 21 bp, homo sapiens
  miR-425-3p|-1|-2
catcgggaatgtcgtgtccgc

SEQ ID NO: 867 - DNA, 23 bp, homo sapiens
  miR-20b-5p|0|0
caaagtgctcatagtgcaggtag

SEQ ID NO: 868 - DNA, 24 bp, homo sapiens
  miR-20b-5p|0|1
caaagtgctcatagtgcaggtagt

SEQ ID NO: 869 - DNA, 22 bp, homo sapiens
  miR-200a-5p|0|0
catcttaccggacagtgctgga

SEQ ID NO: 870 - DNA, 22 bp, homo sapiens
  miR-451a|0|0
aaaccgttaccattactgagtt

SEQ ID NO: 871 - DNA, 21 bp, homo sapiens
  miR-451a|0|-1
aaaccgttaccattactgagt

SEQ ID NO: 872 - DNA, 23 bp, homo sapiens
  miR-451a|0|1
aaaccgttaccattactgagttt

SEQ ID NO: 873 - DNA, 20 bp, homo sapiens
  miR-451a|0|-2
aaaccgttaccattactgag

SEQ ID NO: 874 - DNA, 25 bp, homo sapiens
  miR-451a|0|3
aaaccgttaccattactgagtttag

SEQ ID NO: 875 - DNA, 20 bp, homo sapiens
  miR-451a|1|-1
aaccgttaccattactgagt

SEQ ID NO: 876 - DNA, 22 bp, homo sapiens
  miR-452-5p|0|0
aactgtttgcagaggaaactga

SEQ ID NO: 877 - DNA, 23 bp, homo sapiens
  miR-452-5p|0|1
aactgtttgcagaggaaactgag

SEQ ID NO: 878 - DNA, 24 bp, homo sapiens
  miR-452-5p|0|2
aactgtttgcagaggaaactgaga

SEQ ID NO: 879 - DNA, 21 bp, homo sapiens
  miR-452-5p|3|2
tgtttgcagaggaaactgaga

SEQ ID NO: 880 - DNA, 22 bp, homo sapiens
  miR-484|0|0
tcaggctcagtcccctcccgat

SEQ ID NO: 881 - DNA, 21 bp, homo sapiens
  miR-484|0|-1
tcaggctcagtcccctcccga

SEQ ID NO: 882 - DNA, 23 bp, homo sapiens
  miR-484|0|1
tcaggctcagtcccctcccgata

SEQ ID NO: 883 - DNA, 24 bp, homo sapiens
  miR-484|0|2
tcaggctcagtcccctcccgataa

SEQ ID NO: 884 - DNA, 23 bp, homo sapiens
  21miR-486-5p|0|1
tcctgtactgagctgccccgagg

SEQ ID NO: 885 - DNA, 22 bp, homo sapiens
  miR-491-5p|0|0
agtggggaacccttccatgagg

SEQ ID NO: 886 - DNA, 22 bp, homo sapiens
  miR-146b-5p|0|0
tgagaactgaattccataggct

SEQ ID NO: 887 - DNA, 21 bp, homo sapiens
  miR-146b-5p|0|-1
tgagaactgaattccataggc

SEQ ID NO: 888 - DNA, 23 bp, homo sapiens
  miR-146b-5p|0|1
tgagaactgaattccataggctg

SEQ ID NO: 889 - DNA, 24 bp, homo sapiens
  miR-146b-5p|0|2
tgagaactgaattccataggctgt

SEQ ID NO: 890 - DNA, 25 bp, homo sapiens
  miR-146b-5p|0|3
tgagaactgaattccataggctgtg

SEQ ID NO: 891 - DNA, 26 bp, homo sapiens
  miR-146b-5p|0|4
tgagaactgaattccataggctgtga

SEQ ID NO: 892 - DNA, 23 bp, homo sapiens
  miR-432-5p|0|0
tcttggagtaggtcattgggtgg

SEQ ID NO: 893 - DNA, 22 bp, homo sapiens
  miR-193b-3p|0|0
aactggccctcaaagtcccgct

SEQ ID NO: 894 - DNA, 21 bp, homo sapiens
  miR-193b-3p|0|-1
aactggccctcaaagtcccgc

SEQ ID NO: 895 - DNA, 23 bp, homo sapiens
  miR-193b-3p|0|1
aactggccctcaaagtcccgctt

SEQ ID NO: 896 - DNA, 24 bp, homo sapiens
  miR-193b-3p|0|2
aactggccctcaaagtcccgcttt

SEQ ID NO: 897 - DNA, 21 bp, homo sapiens
  miR-497-5p|0|0
cagcagcacactgtggtttgt

SEQ ID NO: 898 - DNA, 22 bp, homo sapiens
  miR-497-5p|0|1
cagcagcacactgtggtttgta

SEQ ID NO: 899 - DNA, 23 bp, homo sapiens
  miR-497-5p|0|2
cagcagcacactgtggtttgtac

SEQ ID NO: 900 - DNA, 23 bp, homo sapiens
  miR-181d-5p|0|0
aacattcattgttgtcggtgggt

SEQ ID NO: 901 - DNA, 22 bp, homo sapiens
  miR-181d-5p|0|-1
aacattcattgttgtcggtggg

SEQ ID NO: 902 - DNA, 24 bp, homo sapiens
  miR-181d-5p|0|1
aacattcattgttgtcggtgggtt

SEQ ID NO: 903 - DNA, 21 bp, homo sapiens
  miR-181d-5p|0|-2
aacattcattgttgtcggtgg

SEQ ID NO: 904 - DNA, 25 bp, homo sapiens
  28miR-500a-3p|0|3
atgcacctgggcaaggattctgaga

SEQ ID NO: 905 - DNA, 22 bp, homo sapiens
  28miR-501-5p|0|0
aatcctttgtccctgggtgaga

SEQ ID NO: 906 - DNA, 23 bp, homo sapiens
  28miR-501-5p|0|1
aatcctttgtccctgggtgagag

SEQ ID NO: 907 - DNA, 24 bp, homo sapiens
  28miR-501-5p|0|2
aatcctttgtccctgggtgagagt

SEQ ID NO: 908 - DNA, 24 bp, homo sapiens
  28miR-502-5p|-1|2
aatccttgctatctgggtgctagt

SEQ ID NO: 909 - DNA, 23 bp, homo sapiens
  miR-503-5p|0|0
tagcagcgggaacagttctgcag

SEQ ID NO: 910 - DNA, 22 bp, homo sapiens
  28miR-505-3p|0|0
cgtcaacacttgctggtttcct

SEQ ID NO: 911 - DNA, 21 bp, homo sapiens
  28miR-505-3p|0|-1
cgtcaacacttgctggtttcc

SEQ ID NO: 912 - DNA, 23 bp, homo sapiens
  28miR-505-3p|0|1
cgtcaacacttgctggtttcctc

SEQ ID NO: 913 - DNA, 24 bp, homo sapiens
  28miR-505-3p|0|2
cgtcaacacttgctggtttcctct

SEQ ID NO: 914 - DNA, 21 bp, homo sapiens
  28miR-505-3p|1|0
gtcaacacttgctggtttcct

SEQ ID NO: 915 - DNA, 22 bp, homo sapiens
  28miR-505-3p|1|1
gtcaacacttgctggtttcctc

SEQ ID NO: 916 - DNA, 23 bp, homo sapiens
  28miR-505-3p|1|2
gtcaacacttgctggtttcctct

SEQ ID NO: 917 - DNA, 22 bp, homo sapiens
  28miR-505-3p|2|2
tcaacacttgctggtttcctct

SEQ ID NO: 918 - DNA, 22 bp, homo sapiens
  28miR-506-3p|-1|0
gtaaggcacccttctgagtaga

SEQ ID NO: 919 - DNA, 21 bp, homo sapiens
  28miR-506-3p|-1|-1
gtaaggcacccttctgagtag

SEQ ID NO: 920 - DNA, 23 bp, homo sapiens
  28miR-506-3p|-2|0
tgtaaggcacccttctgagtaga

SEQ ID NO: 921 - DNA, 22 bp, homo sapiens
  28miR-506-3p|-2|-1
tgtaaggcacccttctgagtag

SEQ ID NO: 922 - DNA, 23 bp, homo sapiens
  28miR-508-3p|0|0
tgattgtagccttttggagtaga

SEQ ID NO: 923 - DNA, 22 bp, homo sapiens
  28miR-508-3p|0|-1
tgattgtagccttttggagtag

SEQ ID NO: 924 - DNA, 24 bp, homo sapiens
  28miR-508-3p|0|1
tgattgtagccttttggagtagag

SEQ ID NO: 925 - DNA, 21 bp, homo sapiens
  28miR-508-3p|0|-2
tgattgtagccttttggagta

SEQ ID NO: 926 - DNA, 20 bp, homo sapiens
  28miR-508-3p|0|-3
tgattgtagccttttggagt

SEQ ID NO: 927 - DNA, 19 bp, homo sapiens
  28miR-508-3p|0|-4
tgattgtagccttttggag

SEQ ID NO: 928 - DNA, 22 bp, homo sapiens
  28miR-508-3p|1|0
gattgtagccttttggagtaga

SEQ ID NO: 929 - DNA, 21 bp, homo sapiens
  28miR-508-3p|1|-1
gattgtagccttttggagtag

SEQ ID NO: 930 - DNA, 21 bp, homo sapiens
  28miR-508-3p|2|0
attgtagccttttggagtaga

SEQ ID NO: 931 - DNA, 20 bp, homo sapiens
  28miR-508-3p|2|-1
attgtagccttttggagtag

SEQ ID NO: 932 - DNA, 22 bp, homo sapiens
  28miR-508-3p|2|1
attgtagccttttggagtagag

SEQ ID NO: 933 - DNA, 23 bp, homo sapiens
  28miR-508-3p|2|2
attgtagccttttggagtagagt

SEQ ID NO: 934 - DNA, 22 bp, homo sapiens
  28miR-509-3p|0|0
tgattggtacgtctgtgggtag

SEQ ID NO: 935 - DNA, 21 bp, homo sapiens
  28miR-509-3p|0|-1
tgattggtacgtctgtgggta

SEQ ID NO: 936 - DNA, 23 bp, homo sapiens
  28miR-509-3p|0|1
tgattggtacgtctgtgggtaga

SEQ ID NO: 937 - DNA, 20 bp, homo sapiens
  28miR-509-3p|0|-2
tgattggtacgtctgtgggt

SEQ ID NO: 938 - DNA, 24 bp, homo sapiens
  28miR-509-3p|0|2
tgattggtacgtctgtgggtagag

SEQ ID NO: 939 - DNA, 21 bp, homo sapiens
  28miR-509-3p|2|1
attggtacgtctgtgggtaga

SEQ ID NO: 940 - DNA, 21 bp, homo sapiens
  28miR-514a-3p|0|0
attgacacttctgtgagtaga

SEQ ID NO: 941 - DNA, 23 bp, homo sapiens
  28miR-514a-3p|-2|0
tgattgacacttctgtgagtaga

SEQ ID NO: 942 - DNA, 22 bp, homo sapiens
  28miR-514a-3p|-2|-1
tgattgacacttctgtgagtag

SEQ ID NO: 943 - DNA, 22 bp, homo sapiens
  28miR-532-5p|0|0
catgccttgagtgtaggaccgt

SEQ ID NO: 944 - DNA, 21 bp, homo sapiens
  28miR-532-5p|0|-1
catgccttgagtgtaggaccg

SEQ ID NO: 945 - DNA, 23 bp, homo sapiens
  28miR-532-5p|0|1
catgccttgagtgtaggaccgtt

SEQ ID NO: 946 - DNA, 20 bp, homo sapiens
  28miR-532-5p|0|-2
catgccttgagtgtaggacc

SEQ ID NO: 947 - DNA, 24 bp, homo sapiens
  28miR-532-5p|0|2
catgccttgagtgtaggaccgttg

SEQ ID NO: 948 - DNA, 23 bp, homo sapiens
  28miR-532-5p|-1|0
ccatgccttgagtgtaggaccgt

SEQ ID NO: 949 - DNA, 21 bp, homo sapiens
  28miR-532-5p|1|0
atgccttgagtgtaggaccgt

SEQ ID NO: 950 - DNA, 22 bp, homo sapiens
  28miR-532-5p|1|1
atgccttgagtgtaggaccgtt

SEQ ID NO: 951 - DNA, 23 bp, homo sapiens
  28miR-18a-3p|0|0
actgccctaagtgctccttctgg

SEQ ID NO: 952 - DNA, 22 bp, homo sapiens
  miR-455-5p|0|0
tatgtgcctttggactacatcg

SEQ ID NO: 953 - DNA, 22 bp, homo sapiens
  miR-92b-3p|0|0
tattgcactcgtcccggcctcc

SEQ ID NO: 954 - DNA, 21 bp, homo sapiens
  miR-92b-3p|0|-1
tattgcactcgtcccggcctc

SEQ ID NO: 955 - DNA, 23 bp, homo sapiens
  miR-92b-3p|0|1
tattgcactcgtcccggcctccg

SEQ ID NO: 956 - DNA, 20 bp, homo sapiens
  miR-92b-3p|0|-2
tattgcactcgtcccggcct

SEQ ID NO: 957 - DNA, 24 bp, homo sapiens
  miR-92b-3p|0|2
tattgcactcgtcccggcctccgg

SEQ ID NO: 958 - DNA, 19 bp, homo sapiens
  miR-92b-3p|0|-3
tattgcactcgtcccggcc

SEQ ID NO: 959 - DNA, 22 bp, homo sapiens
  miR-574-3p|0|0
cacgctcatgcacacacccaca

SEQ ID NO: 960 - DNA, 21 bp, homo sapiens
  miR-574-3p|0|-1
cacgctcatgcacacacccac

SEQ ID NO: 961 - DNA, 23 bp, homo sapiens
  miR-574-3p|0|1
cacgctcatgcacacacccacac

SEQ ID NO: 962 - DNA, 20 bp, homo sapiens
  miR-574-3p|0|-2
cacgctcatgcacacaccca

SEQ ID NO: 963 - DNA, 22 bp, homo sapiens
  miR-576-5p|0|0
attctaatttctccacgtcttt

SEQ ID NO: 964 - DNA, 23 bp, homo sapiens
  miR-576-5p|0|1
attctaatttctccacgtctttg

SEQ ID NO: 965 - DNA, 23 bp, homo sapiens
  miR-582-5p|0|0
ttacagttgttcaaccagttact

SEQ ID NO: 966 - DNA, 22 bp, homo sapiens
  miR-582-5p|0|-1
ttacagttgttcaaccagttac

SEQ ID NO: 967 - DNA, 22 bp, homo sapiens
  miR-582-5p|1|0
tacagttgttcaaccagttact

SEQ ID NO: 968 - DNA, 22 bp, homo sapiens
  miR-584-5p|0|0
ttatggtttgcctgggactgag

SEQ ID NO: 969 - DNA, 21 bp, homo sapiens
  miR-584-5p|0|-1
ttatggtttgcctgggactga

SEQ ID NO: 970 - DNA, 23 bp, homo sapiens
  miR-584-5p|0|1
ttatggtttgcctgggactgagg

SEQ ID NO: 971 - DNA, 20 bp, homo sapiens
  miR-584-5p|0|-2
ttatggtttgcctgggactg

SEQ ID NO: 972 - DNA, 24 bp, homo sapiens
  miR-584-5p|0|2
ttatggtttgcctgggactgagga

SEQ ID NO: 973 - DNA, 23 bp, homo sapiens
  miR-584-5p|-1|0
attatggtttgcctgggactgag

SEQ ID NO: 974 - DNA, 22 bp, homo sapiens
  miR-584-5p|-1|-1
attatggtttgcctgggactga

SEQ ID NO: 975 - DNA, 24 bp, homo sapiens
  3miR-589-3p|0|0
tcagaacaaatgccggttcccaga

SEQ ID NO: 976 - DNA, 23 bp, homo sapiens
  3miR-589-3p|0|-1
tcagaacaaatgccggttcccag

SEQ ID NO: 977 - DNA, 22 bp, homo sapiens
  3miR-590-5p|0|0
gagcttattcataaaagtgcag

SEQ ID NO: 978 - DNA, 22 bp, homo sapiens
  miR-592|0|0
ttgtgtcaatatgcgatgatgt

SEQ ID NO: 979 - DNA, 22 bp, homo sapiens
  32miR-598-3p|0|0
tacgtcatcgttgtcatcgtca

SEQ ID NO: 980 - DNA, 21 bp, homo sapiens
  32miR-598-3p|0|-1
tacgtcatcgttgtcatcgtc

SEQ ID NO: 981 - DNA, 23 bp, homo sapiens
  32miR-598-3p|0|1
tacgtcatcgttgtcatcgtcat

SEQ ID NO: 982 - DNA, 23 bp, homo sapiens
  32miR-618|0|0
aaactctacttgtccttctgagt

SEQ ID NO: 983 - DNA, 22 bp, homo sapiens
  32miR-618|0|-1
aaactctacttgtccttctgag

SEQ ID NO: 984 - DNA, 22 bp, homo sapiens
  32miR-627-5p|0|0
gtgagtctctaagaaaagagga

SEQ ID NO: 985 - DNA, 22 bp, homo sapiens
  32miR-628-3p|-1|0
ttctagtaagagtggcagtcga

SEQ ID NO: 986 - DNA, 21 bp, homo sapiens
  32miR-629-3p|0|-1
gttctcccaacgtaagcccag

SEQ ID NO: 987 - DNA, 22 bp, homo sapiens
  miR-651-5p|0|0
tttaggataagcttgacttttg

SEQ ID NO: 988 - DNA, 23 bp, homo sapiens
  miR-651-5p|0|1
tttaggataagcttgacttttgt

SEQ ID NO: 989 - DNA, 21 bp, homo sapiens
  miR-652-3p|0|0
aatggcgccactagggttgtg

SEQ ID NO: 990 - DNA, 20 bp, homo sapiens
  miR-652-3p|0|-1
aatggcgccactagggttgt

SEQ ID NO: 991 - DNA, 22 bp, homo sapiens
  miR-652-3p|0|1
aatggcgccactagggttgtgc

SEQ ID NO: 992 - DNA, 23 bp, homo sapiens
  miR-652-3p|0|2
aatggcgccactagggttgtgca

SEQ ID NO: 993 - DNA, 21 bp, homo sapiens
  miR-653-5p|3|3
ttgaaacaatctctactgaac

SEQ ID NO: 994 - DNA, 22 bp, homo sapiens
  miR-653-5p|3|4
ttgaaacaatctctactgaacc

SEQ ID NO: 995 - DNA, 22 bp, homo sapiens
  miR-660-5p|0|0
tacccattgcatatcggagttg

SEQ ID NO: 996 - DNA, 23 bp, homo sapiens
  miR-660-5p|0|1
tacccattgcatatcggagttgt

SEQ ID NO: 997 - DNA, 24 bp, homo sapiens
  miR-660-5p|0|2
tacccattgcatatcggagttgtg

SEQ ID NO: 998 - DNA, 23 bp, homo sapiens
  miR-421|0|0
atcaacagacattaattgggcgc

SEQ ID NO: 999 - DNA, 22 bp, homo sapiens
  miR-421|0|-1
atcaacagacattaattgggcg

SEQ ID NO: 1000 - DNA, 22 bp, homo sapiens
  miR-542-3p|0|0
tgtgacagattgataactgaaa

SEQ ID NO: 1001 - DNA, 21 bp, homo sapiens
  miR-542-3p|0|-1
tgtgacagattgataactgaa

SEQ ID NO: 1002 - DNA, 23 bp, homo sapiens
  miR-542-3p|0|1
tgtgacagattgataactgaaag

SEQ ID NO: 1003 - DNA, 20 bp, homo sapiens
  miR-542-3p|0|-2
tgtgacagattgataactga

SEQ ID NO: 1004 - DNA, 23 bp, homo sapiens
  miR-542-3p|-1|0
ttgtgacagattgataactgaaa

SEQ ID NO: 1005 - DNA, 22 bp, homo sapiens
  miR-542-3p|-1|-1
ttgtgacagattgataactgaa

SEQ ID NO: 1006 - DNA, 21 bp, homo sapiens
  miR-542-3p|-1|-2
ttgtgacagattgataactga

SEQ ID NO: 1007 - DNA, 23 bp, homo sapiens
  33miR-425-5p|0|0
aatgacacgatcactcccgttga

SEQ ID NO: 1008 - DNA, 22 bp, homo sapiens
  33miR-425-5p|0|-1
aatgacacgatcactcccgttg

SEQ ID NO: 1009 - DNA, 24 bp, homo sapiens
  33miR-425-5p|0|1
aatgacacgatcactcccgttgag

SEQ ID NO: 1010 - DNA, 21 bp, homo sapiens
  33miR-425-5p|0|-2
aatgacacgatcactcccgtt

SEQ ID NO: 1011 - DNA, 25 bp, homo sapiens
  33miR-425-5p|0|2
aatgacacgatcactcccgttgagt

SEQ ID NO: 1012 - DNA, 22 bp, homo sapiens
  33miR-425-5p|1|0
atgacacgatcactcccgttga

SEQ ID NO: 1013 - DNA, 23 bp, homo sapiens
  33miR-425-5p|1|1
atgacacgatcactcccgttgag

SEQ ID NO: 1014 - DNA, 24 bp, homo sapiens
  33miR-425-5p|1|2
atgacacgatcactcccgttgagt

SEQ ID NO: 1015 - DNA, 23 bp, homo sapiens
  38miR-671-5p|0|0
aggaagccctggaggggctggag

SEQ ID NO: 1016 - DNA, 24 bp, homo sapiens
  38miR-671-5p|0|1
aggaagccctggaggggctggagg

SEQ ID NO: 1017 - DNA, 23 bp, homo sapiens
  38miR-454-3p|0|0
tagtgcaatattgcttatagggt

SEQ ID NO: 1018 - DNA, 24 bp, homo sapiens
  38miR-454-3p|0|1
tagtgcaatattgcttatagggtt

SEQ ID NO: 1019 - DNA, 22 bp, homo sapiens
  44let-7b-3p|0|0
ctatacaacctactgccttccc

SEQ ID NO: 1020 - DNA, 21 bp, homo sapiens
  44let-7b-3p|0|-1
ctatacaacctactgccttcc

SEQ ID NO: 1021 - DNA, 23 bp, homo sapiens
  44let-7b-3p|0|1
ctatacaacctactgccttccct

SEQ ID NO: 1022 - DNA, 20 bp, homo sapiens
  44let-7b-3p|0|-2
ctatacaacctactgccttc

SEQ ID NO: 1023 - DNA, 22 bp, homo sapiens
  44let-7d-3p|0|0
ctatacgacctgctgcctttct

SEQ ID NO: 1024 - DNA, 21 bp, homo sapiens
  44let-7d-3p|0|-1
ctatacgacctgctgcctttc

SEQ ID NO: 1025 - DNA, 23 bp, homo sapiens
  44let-7d-3p|0|1
ctatacgacctgctgcctttctt

SEQ ID NO: 1026 - DNA, 20 bp, homo sapiens
  44let-7d-3p|0|-2
ctatacgacctgctgccttt

SEQ ID NO: 1027 - DNA, 21 bp, homo sapiens
  44let-7d-3p|1|0
tatacgacctgctgcctttct

SEQ ID NO: 1028 - DNA, 20 bp, homo sapiens
  44let-7d-3p|1|-1
tatacgacctgctgcctttc

SEQ ID NO: 1029 - DNA, 22 bp, homo sapiens
  44let-7d-3p|1|1
tatacgacctgctgcctttctt

SEQ ID NO: 1030 - DNA, 19 bp, homo sapiens
  44let-7d-3p|1|-2
tatacgacctgctgccttt

SEQ ID NO: 1031 - DNA, 22 bp, homo sapiens
  44let-7e-3p|0|0
ctatacggcctcctagctttcc

SEQ ID NO: 1032 - DNA, 21 bp, homo sapiens
  44let-7e-3p|0|-1
ctatacggcctcctagctttc

SEQ ID NO: 1033 - DNA, 22 bp, homo sapiens
  44let-7f-1-3p|0|0
ctatacaatctattgccttccc

SEQ ID NO: 1034 - DNA, 22 bp, homo sapiens
  4489=miR-16-1-3p|0|0
ccagtattaactgtgctgctga

SEQ ID NO: 1035 - DNA, 23 bp, homo sapiens
  44miR-19b-1-5p|0|0
agttttgcaggtttgcatccagc

SEQ ID NO: 1036 - DNA, 22 bp, homo sapiens
  44miR-19b-1-5p|0|-1
agttttgcaggtttgcatccag

SEQ ID NO: 1037 - DNA, 23 bp, homo sapiens
  44miR-20a-3p|0|1
actgcattatgagcacttaaagt

SEQ ID NO: 1038 - DNA, 22 bp, homo sapiens
  44miR-20a-3p|1|1
ctgcattatgagcacttaaagt

SEQ ID NO: 1039 - DNA, 21 bp, homo sapiens
  44miR-21-3p|0|0
caacaccagtcgatgggctgt

SEQ ID NO: 1040 - DNA, 20 bp, homo sapiens
  44miR-21-3p|0|-1
caacaccagtcgatgggctg

SEQ ID NO: 1041 - DNA, 22 bp, homo sapiens
  44miR-21-3p|0|1
caacaccagtcgatgggctgtc

SEQ ID NO: 1042 - DNA, 23 bp, homo sapiens
  44miR-21-3p|0|2
caacaccagtcgatgggctgtct

SEQ ID NO: 1043 - DNA, 22 bp, homo sapiens
  44miR-22-5p|0|0
agttcttcagtggcaagcttta

SEQ ID NO: 1044 - DNA, 21 bp, homo sapiens
  44miR-22-5p|0|-1
agttcttcagtggcaagcttt

SEQ ID NO: 1045 - DNA, 23 bp, homo sapiens
  44miR-22-5p|0|1
agttcttcagtggcaagctttat

SEQ ID NO: 1046 - DNA, 22 bp, homo sapiens
  44miR-23a-5p|0|0
ggggttcctggggatgggattt

SEQ ID NO: 1047 - DNA, 21 bp, homo sapiens
  44miR-23a-5p|0|-1
ggggttcctggggatgggatt

SEQ ID NO: 1048 - DNA, 23 bp, homo sapiens
  44miR-24-2-5p|-1|0
gtgcctactgagctgaaacacag

SEQ ID NO: 1049 - DNA, 22 bp, homo sapiens
  44miR-24-2-5p|-1|-1
gtgcctactgagctgaaacaca

SEQ ID NO: 1050 - DNA, 24 bp, homo sapiens
  44miR-24-2-5p|-1|1
gtgcctactgagctgaaacacagt

SEQ ID NO: 1051 - DNA, 21 bp, homo sapiens
  44miR-24-2-5p|-1|-2
gtgcctactgagctgaaacac

SEQ ID NO: 1052 - DNA, 22 bp, homo sapiens
  44miR-26a-1-3p|0|0
cctattcttggttacttgcacg

SEQ ID NO: 1053 - DNA, 22 bp, homo sapiens
  miR-26b-3p|0|0
cctgttctccattacttggctc

SEQ ID NO: 1054 - DNA, 21 bp, homo sapiens
  miR-26b-3p|0|-1
cctgttctccattacttggct

SEQ ID NO: 1055 - DNA, 23 bp, homo sapiens
  miR-26b-3p|0|1
cctgttctccattacttggctcg

SEQ ID NO: 1056 - DNA, 20 bp, homo sapiens
  miR-26b-3p|0|-2
cctgttctccattacttggc

SEQ ID NO: 1057 - DNA, 22 bp, homo sapiens
  miR-27a-5p|0|0
agggcttagctgcttgtgagca

SEQ ID NO: 1058 - DNA, 22 bp, homo sapiens
  miR-28-3p|0|0
cactagattgtgagctcctgga

SEQ ID NO: 1059 - DNA, 21 bp, homo sapiens
  miR-28-3p|0|-1
cactagattgtgagctcctgg

SEQ ID NO: 1060 - DNA, 23 bp, homo sapiens
  miR-28-3p|0|1
cactagattgtgagctcctggag

SEQ ID NO: 1061 - DNA, 20 bp, homo sapiens
  miR-28-3p|0|-2
cactagattgtgagctcctg

SEQ ID NO: 1062 - DNA, 24 bp, homo sapiens
  miR-28-3p|0|2
cactagattgtgagctcctggagg

SEQ ID NO: 1063 - DNA, 23 bp, homo sapiens
  miR-28-3p|-1|0
ccactagattgtgagctcctgga

SEQ ID NO: 1064 - DNA, 21 bp, homo sapiens
  miR-28-3p|1|0
actagattgtgagctcctgga

SEQ ID NO: 1065 - DNA, 20 bp, homo sapiens
  miR-28-3p|1|-1
actagattgtgagctcctgg

SEQ ID NO: 1066 - DNA, 22 bp, homo sapiens
  miR-28-3p|1|1
actagattgtgagctcctggag

SEQ ID NO: 1067 - DNA, 23 bp, homo sapiens
  miR-28-3p|1|2
actagattgtgagctcctggagg

SEQ ID NO: 1068 - DNA, 20 bp, homo sapiens
  miR-28-3p|2|0
ctagattgtgagctcctgga

SEQ ID NO: 1069 - DNA, 21 bp, homo sapiens
  miR-28-3p|2|1
ctagattgtgagctcctggag

SEQ ID NO: 1070 - DNA, 22 bp, homo sapiens
  miR-28-3p|2|2
ctagattgtgagctcctggagg

SEQ ID NO: 1071 - DNA, 22 bp, homo sapiens
  miR-29a-5p|0|0
actgatttcttttggtgttcag

SEQ ID NO: 1072 - DNA, 23 bp, homo sapiens
  miR-29a-5p|0|1
actgatttcttttggtgttcaga

SEQ ID NO: 1073 - DNA, 23 bp, homo sapiens
  miR-92a-1-5p|0|0
aggttgggatcggttgcaatgct

SEQ ID NO: 1074 - DNA, 22 bp, homo sapiens
  miR-92a-1-5p|0|-1
aggttgggatcggttgcaatgc

SEQ ID NO: 1075 - DNA, 22 bp, homo sapiens
  miR-93-3p|0|0
actgctgagctagcacttcccg

SEQ ID NO: 1076 - DNA, 23 bp, homo sapiens
  miR-93-3p|0|1
actgctgagctagcacttcccga

SEQ ID NO: 1077 - DNA, 22 bp, homo sapiens
  miR-99a-3p|0|0
caagctcgcttctatgggtctg

SEQ ID NO: 1078 - DNA, 23 bp, homo sapiens
  miR-99a-3p|0|1
caagctcgcttctatgggtctgt

SEQ ID NO: 1079 - DNA, 22 bp, homo sapiens
  miR-101-5p|-1|-1
tcagttatcacagtgctgatgc

SEQ ID NO: 1080 - DNA, 24 bp, homo sapiens
  miR-29b-1-5p|0|0
gctggtttcatatggtggtttaga

SEQ ID NO: 1081 - DNA, 23 bp, homo sapiens
  miR-29b-1-5p|0|-1
gctggtttcatatggtggtttag

SEQ ID NO: 1082 - DNA, 22 bp, homo sapiens
  miR-29b-1-5p|0|-2
gctggtttcatatggtggttta

SEQ ID NO: 1083 - DNA, 21 bp, homo sapiens
  miR-29b-1-5p|0|-3
gctggtttcatatggtggttt

SEQ ID NO: 1084 - DNA, 22 bp, homo sapiens
  miR-29b-2-5p|0|0
ctggtttcacatggtggcttag

SEQ ID NO: 1085 - DNA, 23 bp, homo sapiens
  miR-29b-2-5p|0|1
ctggtttcacatggtggcttaga

SEQ ID NO: 1086 - DNA, 24 bp, homo sapiens
  miR-29b-2-5p|0|2
ctggtttcacatggtggcttagat

SEQ ID NO: 1087 - DNA, 24 bp, homo sapiens
  miR-29b-2-5p|-1|1
gctggtttcacatggtggcttaga

SEQ ID NO: 1088 - DNA, 22 bp, homo sapiens
  miR-29b-2-5p|1|1
tggtttcacatggtggcttaga

SEQ ID NO: 1089 - DNA, 22 bp, homo sapiens
  miR-16-2-3p|-1|-1
accaatattactgtgctgcttt

SEQ ID NO: 1090 - DNA, 22 bp, homo sapiens
  miR-192-3p|0|0
ctgccaattccataggtcacag

SEQ ID NO: 1091 - DNA, 22 bp, homo sapiens
  miR-129-1-3p|0|0
aagcccttaccccaaaaagtat

SEQ ID NO: 1092 - DNA, 22 bp, homo sapiens
  miR-148a-5p|0|0
aaagttctgagacactccgact

SEQ ID NO: 1093 - DNA, 20 bp, homo sapiens
  miR-148a-5p|0|-2
aaagttctgagacactccga

SEQ ID NO: 1094 - DNA, 23 bp, homo sapiens
  miR-148a-5p|-1|0
caaagttctgagacactccgact

SEQ ID NO: 1095 - DNA, 21 bp, homo sapiens
  miR-148a-5p|-1|-2
caaagttctgagacactccga

SEQ ID NO: 1096 - DNA, 22 bp, homo sapiens
  miR-30c-2-3p|0|0
ctgggagaaggctgtttactct

SEQ ID NO: 1097 - DNA, 21 bp, homo sapiens
  miR-30c-2-3p|0|-1
ctgggagaaggctgtttactc

SEQ ID NO: 1098 - DNA, 23 bp, homo sapiens
  miR-30c-2-3p|0|1
ctgggagaaggctgtttactctt

SEQ ID NO: 1099 - DNA, 21 bp, homo sapiens
  miR-30c-2-3p|1|0
tgggagaaggctgtttactct

SEQ ID NO: 1100 - DNA, 22 bp, homo sapiens
  miR-30d-3p|0|0
ctttcagtcagatgtttgctgc

SEQ ID NO: 1101 - DNA, 21 bp, homo sapiens
  miR-30d-3p|0|-1
ctttcagtcagatgtttgctg

SEQ ID NO: 1102 - DNA, 23 bp, homo sapiens
  miR-30d-3p|0|1
ctttcagtcagatgtttgctgct

SEQ ID NO: 1103 - DNA, 21 bp, homo sapiens
  miR-30d-3p|1|0
tttcagtcagatgtttgctgc

SEQ ID NO: 1104 - DNA, 22 bp, homo sapiens
  miR-30d-3p|1|1
tttcagtcagatgtttgctgct

SEQ ID NO: 1105 - DNA, 23 bp, homo sapiens
  miR-139-3p|0|0
tggagacgcggccctgttggagt

SEQ ID NO: 1106 - DNA, 22 bp, homo sapiens
  miR-139-3p|0|-1
tggagacgcggccctgttggag

SEQ ID NO: 1107 - DNA, 21 bp, homo sapiens
  miR-139-3p|0|-2
tggagacgcggccctgttgga

SEQ ID NO: 1108 - DNA, 22 bp, homo sapiens
  miR-7-1-3p|0|0
caacaaatcacagtctgccata

SEQ ID NO: 1109 - DNA, 21 bp, homo sapiens
  miR-7-1-3p|0|-1
caacaaatcacagtctgccat

SEQ ID NO: 1110 - DNA, 22 bp, homo sapiens
  miR-181a-2-3p|0|0
accactgaccgttgactgtacc

SEQ ID NO: 1111 - DNA, 21 bp, homo sapiens
  miR-181a-2-3p|0|-1
accactgaccgttgactgtac

SEQ ID NO: 1112 - DNA, 23 bp, homo sapiens
  miR-181a-2-3p|0|1
accactgaccgttgactgtacct

SEQ ID NO: 1113 - DNA, 20 bp, homo sapiens
  miR-181a-2-3p|0|-2
accactgaccgttgactgta

SEQ ID NO: 1114 - DNA, 24 bp, homo sapiens
  miR-181a-2-3p|0|2
accactgaccgttgactgtacctt

SEQ ID NO: 1115 - DNA, 19 bp, homo sapiens
  miR-181a-2-3p|0|-3
accactgaccgttgactgt

SEQ ID NO: 1116 - DNA, 23 bp, homo sapiens
  miR-181a-2-3p|-1|0
aaccactgaccgttgactgtacc

SEQ ID NO: 1117 - DNA, 21 bp, homo sapiens
  miR-181a-2-3p|1|0
ccactgaccgttgactgtacc

SEQ ID NO: 1118 - DNA, 22 bp, homo sapiens
  miR-181a-2-3p|-1|-1
aaccactgaccgttgactgtac

SEQ ID NO: 1119 - DNA, 20 bp, homo sapiens
  miR-181a-2-3p|1|-1
ccactgaccgttgactgtac

SEQ ID NO: 1120 - DNA, 21 bp, homo sapiens
  miR-181a-2-3p|-1|-2
aaccactgaccgttgactgta

SEQ ID NO: 1121 - DNA, 20 bp, homo sapiens
  miR-181a-2-3p|-1|-3
aaccactgaccgttgactgt

SEQ ID NO: 1122 - DNA, 21 bp, homo sapiens
  miR-181c-3p|1|0
accatcgaccgttgagtggac

SEQ ID NO: 1123 - DNA, 20 bp, homo sapiens
  miR-181c-3p|1|-1
accatcgaccgttgagtgga

SEQ ID NO: 1124 - DNA, 22 bp, homo sapiens
  miR-181c-3p|1|1
accatcgaccgttgagtggacc

SEQ ID NO: 1125 - DNA, 22 bp, homo sapiens
  miR-199b-3p|0|0
acagtagtctgcacattggtta

SEQ ID NO: 1126 - DNA, 21 bp, homo sapiens
  miR-199b-3p|0|-1
acagtagtctgcacattggtt

SEQ ID NO: 1127 - DNA, 23 bp, homo sapiens
  miR-199b-3p|0|1
acagtagtctgcacattggttag

SEQ ID NO: 1128 - DNA, 20 bp, homo sapiens
  miR-199b-3p|0|-2
acagtagtctgcacattggt

SEQ ID NO: 1129 - DNA, 23 bp, homo sapiens
  miR-199b-3p|-1|0
tacagtagtctgcacattggtta

SEQ ID NO: 1130 - DNA, 21 bp, homo sapiens
  miR-199b-3p|1|0
cagtagtctgcacattggtta

SEQ ID NO: 1131 - DNA, 22 bp, homo sapiens
  miR-199b-3p|-1|-1
tacagtagtctgcacattggtt

SEQ ID NO: 1132 - DNA, 20 bp, homo sapiens
  miR-199b-3p|1|-1
cagtagtctgcacattggtt

SEQ ID NO: 1133 - DNA, 22 bp, homo sapiens
  miR-199b-3p|1|1
cagtagtctgcacattggttag

SEQ ID NO: 1134 - DNA, 21 bp, homo sapiens
  miR-199b-3p|-1|-2
tacagtagtctgcacattggt

SEQ ID NO: 1135 - DNA, 22 bp, homo sapiens
  45miR-219a-1-3p|0|0
agagttgagtctggacgtcccg

SEQ ID NO: 1136 - DNA, 23 bp, homo sapiens
  45miR-219a-1-3p|0|1
agagttgagtctggacgtcccga

SEQ ID NO: 1137 - DNA, 21 bp, homo sapiens
  45let-7g-3p|0|0
ctgtacaggccactgccttgc

SEQ ID NO: 1138 - DNA, 22 bp, homo sapiens
  45let-7g-3p|0|1
ctgtacaggccactgccttgcc

SEQ ID NO: 1139 - DNA, 22 bp, homo sapiens
  45let-7i-3p|0|0
ctgcgcaagctactgccttgct

SEQ ID NO: 1140 - DNA, 21 bp, homo sapiens
  45let-7i-3p|0|-1
ctgcgcaagctactgccttgc

SEQ ID NO: 1141 - DNA, 20 bp, homo sapiens
  45let-7i-3p|0|-2
ctgcgcaagctactgccttg

SEQ ID NO: 1142 - DNA, 22 bp, homo sapiens
  45miR-15b-3p|0|0
cgaatcattatttgctgctcta

SEQ ID NO: 1143 - DNA, 21 bp, homo sapiens
  45miR-15b-3p|0|-1
cgaatcattatttgctgctct

SEQ ID NO: 1144 - DNA, 23 bp, homo sapiens
  45miR-15b-3p|0|1
cgaatcattatttgctgctctag

SEQ ID NO: 1145 - DNA, 22 bp, homo sapiens
  45miR-27b-5p|0|0
agagcttagctgattggtgaac

SEQ ID NO: 1146 - DNA, 23 bp, homo sapiens
  45miR-27b-5p|-1|0
cagagcttagctgattggtgaac

SEQ ID NO: 1147 - DNA, 22 bp, homo sapiens
  miR-30b-3p|0|0
ctgggaggtggatgtttacttc

SEQ ID NO: 1148 - DNA, 21 bp, homo sapiens
  miR-30b-3p|0|-1
ctgggaggtggatgtttactt

SEQ ID NO: 1149 - DNA, 23 bp, homo sapiens
  miR-30b-3p|0|1
ctgggaggtggatgtttacttca

SEQ ID NO: 1150 - DNA, 20 bp, homo sapiens
  miR-30b-3p|0|-2
ctgggaggtggatgtttact

SEQ ID NO: 1151 - DNA, 22 bp, homo sapiens
  45miR-132-5p|0|0
accgtggctttcgattgttact

SEQ ID NO: 1152 - DNA, 21 bp, homo sapiens
  45miR-132-5p|0|-1
accgtggctttcgattgttac

SEQ ID NO: 1153 - DNA, 21 bp, homo sapiens
  45miR-140-3p|0|0
taccacagggtagaaccacgg

SEQ ID NO: 1154 - DNA, 20 bp, homo sapiens
  45miR-140-3p|0|-1
taccacagggtagaaccacg

SEQ ID NO: 1155 - DNA, 22 bp, homo sapiens
  45miR-140-3p|0|1
taccacagggtagaaccacgga

SEQ ID NO: 1156 - DNA, 23 bp, homo sapiens
  45miR-140-3p|0|2
taccacagggtagaaccacggac

SEQ ID NO: 1157 - DNA, 24 bp, homo sapiens
  45miR-140-3p|0|3
taccacagggtagaaccacggaca

SEQ ID NO: 1158 - DNA, 25 bp, homo sapiens
  45miR-140-3p|0|4
taccacagggtagaaccacggacag

SEQ ID NO: 1159 - DNA, 20 bp, homo sapiens
  45miR-140-3p|1|0
accacagggtagaaccacgg

SEQ ID NO: 1160 - DNA, 19 bp, homo sapiens
  45miR-140-3p|1|-1
accacagggtagaaccacg

SEQ ID NO: 1161 - DNA, 21 bp, homo sapiens
  45miR-140-3p|1|1
accacagggtagaaccacgga

SEQ ID NO: 1162 - DNA, 22 bp, homo sapiens
  45miR-140-3p|1|2
accacagggtagaaccacggac

SEQ ID NO: 1163 - DNA, 23 bp, homo sapiens
  45miR-140-3p|1|3
accacagggtagaaccacggaca

SEQ ID NO: 1164 - DNA, 24 bp, homo sapiens
  45miR-140-3p|1|4
accacagggtagaaccacggacag

SEQ ID NO: 1165 - DNA, 20 bp, homo sapiens
  45miR-140-3p|2|1
ccacagggtagaaccacgga

SEQ ID NO: 1166 - DNA, 21 bp, homo sapiens
  45miR-140-3p|2|2
ccacagggtagaaccacggac

SEQ ID NO: 1167 - DNA, 22 bp, homo sapiens
  45miR-140-3p|2|3
ccacagggtagaaccacggaca

SEQ ID NO: 1168 - DNA, 23 bp, homo sapiens
  45miR-140-3p|2|4
ccacagggtagaaccacggacag

SEQ ID NO: 1169 - DNA, 24 bp, homo sapiens
  45miR-140-3p|2|5
ccacagggtagaaccacggacagg

SEQ ID NO: 1170 - DNA, 21 bp, homo sapiens
  45miR-140-3p|3|3
cacagggtagaaccacggaca

SEQ ID NO: 1171 - DNA, 22 bp, homo sapiens
  45miR-140-3p|3|4
cacagggtagaaccacggacag

SEQ ID NO: 1172 - DNA, 20 bp, homo sapiens
  45miR-140-3p|4|3
acagggtagaaccacggaca

SEQ ID NO: 1173 - DNA, 21 bp, homo sapiens
  45miR-140-3p|4|4
acagggtagaaccacggacag

SEQ ID NO: 1174 - DNA, 22 bp, homo sapiens
  45miR-140-3p|4|5
acagggtagaaccacggacagg

SEQ ID NO: 1175 - DNA, 23 bp, homo sapiens
  45miR-140-3p|4|6
acagggtagaaccacggacagga

SEQ ID NO: 1176 - DNA, 21 bp, homo sapiens
  45miR-143-5p|0|-1
ggtgcagtgctgcatctctgg

SEQ ID NO: 1177 - DNA, 22 bp, homo sapiens
  miR-144-5p|0|0
ggatatcatcatatactgtaag

SEQ ID NO: 1178 - DNA, 23 bp, homo sapiens
  miR-144-5p|0|1
ggatatcatcatatactgtaagt

SEQ ID NO: 1179 - DNA, 22 bp, homo sapiens
  miR-145-3p|0|0
ggattcctggaaatactgttct

SEQ ID NO: 1180 - DNA, 20 bp, homo sapiens
  miR-145-3p|2|0
attcctggaaatactgttct

SEQ ID NO: 1181 - DNA, 21 bp, homo sapiens
  miR-145-3p|2|1
attcctggaaatactgttctt

SEQ ID NO: 1182 - DNA, 22 bp, homo sapiens
  miR-125a-3p|0|0
acaggtgaggttcttgggagcc

SEQ ID NO: 1183 - DNA, 21 bp, homo sapiens
  miR-125a-3p|0|-1
acaggtgaggttcttgggagc

SEQ ID NO: 1184 - DNA, 20 bp, homo sapiens
  miR-125a-3p|0|-2
acaggtgaggttcttgggag

SEQ ID NO: 1185 - DNA, 22 bp, homo sapiens
  miR-125b-2-3p|0|0
tcacaagtcaggctcttgggac

SEQ ID NO: 1186 - DNA, 23 bp, homo sapiens
  miR-125b-2-3p|0|1
tcacaagtcaggctcttgggacc

SEQ ID NO: 1187 - DNA, 23 bp, homo sapiens
  miR-125b-2-3p|-1|0
atcacaagtcaggctcttgggac

SEQ ID NO: 1188 - DNA, 22 bp, homo sapiens
  miR-125b-2-3p|-1|-1
atcacaagtcaggctcttggga

SEQ ID NO: 1189 - DNA, 20 bp, homo sapiens
  miR-125b-2-3p|2|0
acaagtcaggctcttgggac

SEQ ID NO: 1190 - DNA, 21 bp, homo sapiens
  miR-125b-2-3p|2|1
acaagtcaggctcttgggacc

SEQ ID NO: 1191 - DNA, 22 bp, homo sapiens
  miR-125b-2-3p|2|2
acaagtcaggctcttgggacct

SEQ ID NO: 1192 - DNA, 23 bp, homo sapiens
  miR-125b-2-3p|2|3
acaagtcaggctcttgggaccta

SEQ ID NO: 1193 - DNA, 24 bp, homo sapiens
  miR-125b-2-3p|2|4
acaagtcaggctcttgggacctag

SEQ ID NO: 1194 - DNA, 22 bp, homo sapiens
  miR-127-5p|0|0
ctgaagctcagagggctctgat

SEQ ID NO: 1195 - DNA, 21 bp, homo sapiens
  miR-127-5p|0|-1
ctgaagctcagagggctctga

SEQ ID NO: 1196 - DNA, 22 bp, homo sapiens
  miR-129-2-3p|0|0
aagcccttaccccaaaaagcat

SEQ ID NO: 1197 - DNA, 21 bp, homo sapiens
  miR-129-2-3p|0|-1
aagcccttaccccaaaaagca

SEQ ID NO: 1198 - DNA, 21 bp, homo sapiens
  miR-138-1-3p|0|-1
gctacttcacaacaccagggc

SEQ ID NO: 1199 - DNA, 22 bp, homo sapiens
  miR-146a-3p|0|0
cctctgaaattcagttcttcag

SEQ ID NO: 1200 - DNA, 21 bp, homo sapiens
  miR-146a-3p|0|-1
cctctgaaattcagttcttca

SEQ ID NO: 1201 - DNA, 21 bp, homo sapiens
  miR-146a-3p|1|0
ctctgaaattcagttcttcag

SEQ ID NO: 1202 - DNA, 22 bp, homo sapiens
  miR-146a-3p|-1|-1
acctctgaaattcagttcttca

SEQ ID NO: 1203 - DNA, 21 bp, homo sapiens
  miR-146a-3p|-1|-2
acctctgaaattcagttcttc

SEQ ID NO: 1204 - DNA, 23 bp, homo sapiens
  miR-146a-3p|-2|-1
gacctctgaaattcagttcttca

SEQ ID NO: 1205 - DNA, 22 bp, homo sapiens
  miR-146a-3p|-2|-2
gacctctgaaattcagttcttc

SEQ ID NO: 1206 - DNA, 21 bp, homo sapiens
  miR-146a-3p|-2|-3
gacctctgaaattcagttctt

SEQ ID NO: 1207 - DNA, 22 bp, homo sapiens
  miR-185-3p|0|0
aggggctggctttcctctggtc

SEQ ID NO: 1208 - DNA, 21 bp, homo sapiens
  miR-185-3p|0|-1
aggggctggctttcctctggt

SEQ ID NO: 1209 - DNA, 20 bp, homo sapiens
  miR-185-3p|0|-2
aggggctggctttcctctgg

SEQ ID NO: 1210 - DNA, 22 bp, homo sapiens
  miR-193a-5p|0|0
tgggtctttgcgggcgagatga

SEQ ID NO: 1211 - DNA, 21 bp, homo sapiens
  miR-193a-5p|0|-1
tgggtctttgcgggcgagatg

SEQ ID NO: 1212 - DNA, 23 bp, homo sapiens
  miR-193a-5p|0|1
tgggtctttgcgggcgagatgag

SEQ ID NO: 1213 - DNA, 20 bp, homo sapiens
  miR-193a-5p|0|-2
tgggtctttgcgggcgagat

SEQ ID NO: 1214 - DNA, 19 bp, homo sapiens
  miR-193a-5p|0|-3
tgggtctttgcgggcgaga

SEQ ID NO: 1215 - DNA, 18 bp, homo sapiens
  miR-193a-5p|0|-4
tgggtctttgcgggcgag

SEQ ID NO: 1216 - DNA, 22 bp, homo sapiens
  46miR-194-3p|0|0
ccagtggggctgctgttatctg

SEQ ID NO: 1217 - DNA, 23 bp, homo sapiens
  46miR-194-3p|0|1
ccagtggggctgctgttatctgg

SEQ ID NO: 1218 - DNA, 22 bp, homo sapiens
  46miR-106b-3p|0|0
ccgcactgtgggtacttgctgc

SEQ ID NO: 1219 - DNA, 21 bp, homo sapiens
  46miR-106b-3p|0|-1
ccgcactgtgggtacttgctg

SEQ ID NO: 1220 - DNA, 23 bp, homo sapiens
  46miR-106b-3p|0|1
ccgcactgtgggtacttgctgct

SEQ ID NO: 1221 - DNA, 20 bp, homo sapiens
  46miR-106b-3p|0|-2
ccgcactgtgggtacttgct

SEQ ID NO: 1222 - DNA, 19 bp, homo sapiens
  46miR-106b-3p|0|-3
ccgcactgtgggtacttgc

SEQ ID NO: 1223 - DNA, 23 bp, homo sapiens
  46miR-106b-3p|-1|0
accgcactgtgggtacttgctgc

SEQ ID NO: 1224 - DNA, 22 bp, homo sapiens
  46miR-106b-3p|-1|-1
accgcactgtgggtacttgctg

SEQ ID NO: 1225 - DNA, 24 bp, homo sapiens
  46miR-106b-3p|-2|0
taccgcactgtgggtacttgctgc

SEQ ID NO: 1226 - DNA, 23 bp, homo sapiens
  46miR-106b-3p|-2|-1
taccgcactgtgggtacttgctg

SEQ ID NO: 1227 - DNA, 22 bp, homo sapiens
  46miR-106b-3p|-2|-2
taccgcactgtgggtacttgct

SEQ ID NO: 1228 - DNA, 21 bp, homo sapiens
  46miR-106b-3p|-2|-3
taccgcactgtgggtacttgc

SEQ ID NO: 1229 - DNA, 22 bp, homo sapiens
  46miR-29c-5p|0|0
tgaccgatttctcctggtgttc

SEQ ID NO: 1230 - DNA, 21 bp, homo sapiens
  46miR-29c-5p|0|-1
tgaccgatttctcctggtgtt

SEQ ID NO: 1231 - DNA, 23 bp, homo sapiens
  46miR-29c-5p|0|1
tgaccgatttctcctggtgttca

SEQ ID NO: 1232 - DNA, 21 bp, homo sapiens
  46miR-29c-5p|1|0
gaccgatttctcctggtgttc

SEQ ID NO: 1233 - DNA, 22 bp, homo sapiens
  46miR-29c-5p|1|1
gaccgatttctcctggtgttca

SEQ ID NO: 1234 - DNA, 22 bp, homo sapiens
  46miR-29c-5p|2|2
accgatttctcctggtgttcag

SEQ ID NO: 1235 - DNA, 23 bp, homo sapiens
  46miR-29c-5p|2|3
accgatttctcctggtgttcaga

SEQ ID NO: 1236 - DNA, 22 bp, homo sapiens
  miR-30c-1-3p|0|0
ctgggagagggttgtttactcc

SEQ ID NO: 1237 - DNA, 22 bp, homo sapiens
  46miR-219a-2-3p|0|0
agaattgtggctggacatctgt

SEQ ID NO: 1238 - DNA, 22 bp, homo sapiens
  46miR-34c-3p|0|0
aatcactaaccacacggccagg

SEQ ID NO: 1239 - DNA, 21 bp, homo sapiens
  46miR-34c-3p|0|-1
aatcactaaccacacggccag

SEQ ID NO: 1240 - DNA, 22 bp, homo sapiens
  46miR-99b-3p|0|0
caagctcgtgtctgtgggtccg

SEQ ID NO: 1241 - DNA, 21 bp, homo sapiens
  46miR-99b-3p|0|-1
caagctcgtgtctgtgggtcc

SEQ ID NO: 1242 - DNA, 23 bp, homo sapiens
  46miR-99b-3p|0|1
caagctcgtgtctgtgggtccgt

SEQ ID NO: 1243 - DNA, 20 bp, homo sapiens
  46miR-99b-3p|0|-2
caagctcgtgtctgtgggtc

SEQ ID NO: 1244 - DNA, 24 bp, homo sapiens
  46miR-99b-3p|0|2
caagctcgtgtctgtgggtccgtg

SEQ ID NO: 1245 - DNA, 19 bp, homo sapiens
  46miR-99b-3p|0|-3
caagctcgtgtctgtgggt

SEQ ID NO: 1246 - DNA, 22 bp, homo sapiens
  miR-296-3p|0|0
gagggttgggtggaggctctcc

SEQ ID NO: 1247 - DNA, 21 bp, homo sapiens
  miR-296-3p|1|0
agggttgggtggaggctctcc

SEQ ID NO: 1248 - DNA, 22 bp, homo sapiens
  miR-296-3p|1|1
agggttgggtggaggctctcct

SEQ ID NO: 1249 - DNA, 22 bp, homo sapiens
  46miR-130b-5p|0|1
actctttccctgttgcactact

SEQ ID NO: 1250 - DNA, 22 bp, homo sapiens
  46miR-26a-2-3p|0|0
cctattcttgattacttgtttc

SEQ ID NO: 1251 - DNA, 23 bp, homo sapiens
  46miR-361-3p|0|0
tcccccaggtgtgattctgattt

SEQ ID NO: 1252 - DNA, 22 bp, homo sapiens
  46miR-361-3p|0|-1
tcccccaggtgtgattctgatt

SEQ ID NO: 1253 - DNA, 24 bp, homo sapiens
  46miR-361-3p|0|1
tcccccaggtgtgattctgatttg

SEQ ID NO: 1254 - DNA, 21 bp, homo sapiens
  46miR-361-3p|0|-2
tcccccaggtgtgattctgat

SEQ ID NO: 1255 - DNA, 25 bp, homo sapiens
  46miR-361-3p|0|2
tcccccaggtgtgattctgatttgc

SEQ ID NO: 1256 - DNA, 20 bp, homo sapiens
  46miR-361-3p|0|-3
tcccccaggtgtgattctga

SEQ ID NO: 1257 - DNA, 22 bp, homo sapiens
  46miR-361-3p|1|0
cccccaggtgtgattctgattt

SEQ ID NO: 1258 - DNA, 21 bp, homo sapiens
  46miR-361-3p|1|-1
cccccaggtgtgattctgatt

SEQ ID NO: 1259 - DNA, 23 bp, homo sapiens
  46miR-361-3p|1|1
cccccaggtgtgattctgatttg

SEQ ID NO: 1260 - DNA, 24 bp, homo sapiens
  46miR-361-3p|1|2
cccccaggtgtgattctgatttgc

SEQ ID NO: 1261 - DNA, 22 bp, homo sapiens
  46miR-361-3p|-2|-3
agtcccccaggtgtgattctga

SEQ ID NO: 1262 - DNA, 22 bp, homo sapiens
  46miR-362-3p|0|0
aacacacctattcaaggattca

SEQ ID NO: 1263 - DNA, 22 bp, homo sapiens
  46miR-374a-3p|0|0
cttatcagattgtattgtaatt

SEQ ID NO: 1264 - DNA, 21 bp, homo sapiens
  46miR-374a-3p|0|-1
cttatcagattgtattgtaat

SEQ ID NO: 1265 - DNA, 23 bp, homo sapiens
  46miR-374a-3p|0|1
cttatcagattgtattgtaattg

SEQ ID NO: 1266 - DNA, 20 bp, homo sapiens
  46miR-374a-3p|0|-2
cttatcagattgtattgtaa

SEQ ID NO: 1267 - DNA, 19 bp, homo sapiens
  46miR-374a-3p|0|-3
cttatcagattgtattgta

SEQ ID NO: 1268 - DNA, 22 bp, homo sapiens
  46miR-374a-3p|-1|-1
acttatcagattgtattgtaat

SEQ ID NO: 1269 - DNA, 22 bp, homo sapiens
  46miR-340-5p|0|0
ttataaagcaatgagactgatt

SEQ ID NO: 1270 - DNA, 21 bp, homo sapiens
  46miR-340-5p|0|-1
ttataaagcaatgagactgat

SEQ ID NO: 1271 - DNA, 23 bp, homo sapiens
  46miR-340-5p|0|1
ttataaagcaatgagactgattg

SEQ ID NO: 1272 - DNA, 22 bp, homo sapiens
  46miR-330-5p|0|0
tctctgggcctgtgtcttaggc

SEQ ID NO: 1273 - DNA, 21 bp, homo sapiens
  46miR-330-5p|0|-1
tctctgggcctgtgtcttagg

SEQ ID NO: 1274 - DNA, 23 bp, homo sapiens
  46miR-330-5p|0|1
tctctgggcctgtgtcttaggct

SEQ ID NO: 1275 - DNA, 20 bp, homo sapiens
  46miR-330-5p|0|-2
tctctgggcctgtgtcttag

SEQ ID NO: 1276 - DNA, 22 bp, homo sapiens
  46miR-342-5p|0|1
aggggtgctatctgtgattgag

SEQ ID NO: 1277 - DNA, 23 bp, homo sapiens
  46miR-342-5p|0|2
aggggtgctatctgtgattgagg

SEQ ID NO: 1278 - DNA, 21 bp, homo sapiens
  46miR-342-5p|1|1
ggggtgctatctgtgattgag

SEQ ID NO: 1279 - DNA, 22 bp, homo sapiens
  46miR-342-5p|1|2
ggggtgctatctgtgattgagg

SEQ ID NO: 1280 - DNA, 23 bp, homo sapiens
  46miR-342-5p|1|3
ggggtgctatctgtgattgaggg

SEQ ID NO: 1281 - DNA, 23 bp, homo sapiens
  46miR-151a-5p|0|2
tcgaggagctcacagtctagtat

SEQ ID NO: 1282 - DNA, 24 bp, homo sapiens
  46miR-151a-5p|-1|2
ctcgaggagctcacagtctagtat

SEQ ID NO: 1283 - DNA, 21 bp, homo sapiens
  miR-338-5p|0|-1
aacaatatcctggtgctgagt

SEQ ID NO: 1284 - DNA, 20 bp, homo sapiens
  miR-338-5p|0|-2
aacaatatcctggtgctgag

SEQ ID NO: 1285 - DNA, 23 bp, homo sapiens
  miR-339-3p|0|0
tgagcgcctcgacgacagagccg

SEQ ID NO: 1286 - DNA, 22 bp, homo sapiens
  miR-339-3p|0|-1
tgagcgcctcgacgacagagcc

SEQ ID NO: 1287 - DNA, 21 bp, homo sapiens
  miR-339-3p|0|-2
tgagcgcctcgacgacagagc

SEQ ID NO: 1288 - DNA, 22 bp, homo sapiens
  4miR-335-3p|0|0
tttttcattattgctcctgacc

SEQ ID NO: 1289 - DNA, 23 bp, homo sapiens
  4miR-335-3p|-1|0
gtttttcattattgctcctgacc

SEQ ID NO: 1290 - DNA, 23 bp, homo sapiens
  miR-423-5p|0|0
tgaggggcagagagcgagacttt

SEQ ID NO: 1291 - DNA, 22 bp, homo sapiens
  miR-423-5p|0|-1
tgaggggcagagagcgagactt

SEQ ID NO: 1292 - DNA, 24 bp, homo sapiens
  miR-423-5p|0|1
tgaggggcagagagcgagactttt

SEQ ID NO: 1293 - DNA, 21 bp, homo sapiens
  miR-423-5p|0|-2
tgaggggcagagagcgagact

SEQ ID NO: 1294 - DNA, 20 bp, homo sapiens
  miR-423-5p|0|-3
tgaggggcagagagcgagac

SEQ ID NO: 1295 - DNA, 19 bp, homo sapiens
  miR-423-5p|0|-4
tgaggggcagagagcgaga

SEQ ID NO: 1296 - DNA, 23 bp, homo sapiens
  47miR-146b-3p|0|1
tgccctgtggactcagttctggt

SEQ ID NO: 1297 - DNA, 22 bp, homo sapiens
  47miR-146b-3p|1|1
gccctgtggactcagttctggt

SEQ ID NO: 1298 - DNA, 23 bp, homo sapiens
  47miR-146b-3p|1|2
gccctgtggactcagttctggtg

SEQ ID NO: 1299 - DNA, 22 bp, homo sapiens
  47miR-193b-5p|0|0
cggggttttgagggcgagatga

SEQ ID NO: 1300 - DNA, 22 bp, homo sapiens
  miR-501-3p|0|0
aatgcacccgggcaaggattct

SEQ ID NO: 1301 - DNA, 21 bp, homo sapiens
  miR-501-3p|0|-1
aatgcacccgggcaaggattc

SEQ ID NO: 1302 - DNA, 23 bp, homo sapiens
  miR-501-3p|0|1
aatgcacccgggcaaggattctg

SEQ ID NO: 1303 - DNA, 20 bp, homo sapiens
  miR-501-3p|0|-2
aatgcacccgggcaaggatt

SEQ ID NO: 1304 - DNA, 24 bp, homo sapiens
  miR-501-3p|0|2
aatgcacccgggcaaggattctga

SEQ ID NO: 1305 - DNA, 21 bp, homo sapiens
  miR-501-3p|1|0
atgcacccgggcaaggattct

SEQ ID NO: 1306 - DNA, 22 bp, homo sapiens
  miR-501-3p|1|1
atgcacccgggcaaggattctg

SEQ ID NO: 1307 - DNA, 23 bp, homo sapiens
  miR-501-3p|1|2
atgcacccgggcaaggattctga

SEQ ID NO: 1308 - DNA, 22 bp, homo sapiens
  47miR-502-3p|0|0
aatgcacctgggcaaggattca

SEQ ID NO: 1309 - DNA, 23 bp, homo sapiens
  47miR-502-3p|0|1
aatgcacctgggcaaggattcag

SEQ ID NO: 1310 - DNA, 22 bp, homo sapiens
  47miR-505-5p|0|0
gggagccaggaagtattgatgt

SEQ ID NO: 1311 - DNA, 23 bp, homo sapiens
  47miR-505-5p|0|1
gggagccaggaagtattgatgtt

SEQ ID NO: 1312 - DNA, 24 bp, homo sapiens
  47miR-505-5p|0|2
gggagccaggaagtattgatgttt

SEQ ID NO: 1313 - DNA, 23 bp, homo sapiens
  47miR-508-5p|0|0
tactccagagggcgtcactcatg

SEQ ID NO: 1314 - DNA, 22 bp, homo sapiens
  47miR-508-5p|0|-1
tactccagagggcgtcactcat

SEQ ID NO: 1315 - DNA, 24 bp, homo sapiens
  47miR-508-5p|0|1
tactccagagggcgtcactcatgt

SEQ ID NO: 1316 - DNA, 21 bp, homo sapiens
  47miR-508-5p|0|-2
tactccagagggcgtcactca

SEQ ID NO: 1317 - DNA, 22 bp, homo sapiens
  47miR-532-3p|0|0
cctcccacacccaaggcttgca

SEQ ID NO: 1318 - DNA, 21 bp, homo sapiens
  47miR-532-3p|0|-1
cctcccacacccaaggcttgc

SEQ ID NO: 1319 - DNA, 23 bp, homo sapiens
  47miR-532-3p|0|1
cctcccacacccaaggcttgcaa

SEQ ID NO: 1320 - DNA, 20 bp, homo sapiens
  47miR-532-3p|0|-2
cctcccacacccaaggcttg

SEQ ID NO: 1321 - DNA, 21 bp, homo sapiens
  47miR-455-3p|0|0
gcagtccatgggcatatacac

SEQ ID NO: 1322 - DNA, 20 bp, homo sapiens
  47miR-455-3p|0|-1
gcagtccatgggcatataca

SEQ ID NO: 1323 - DNA, 22 bp, homo sapiens
  47miR-455-3p|0|1
gcagtccatgggcatatacact

SEQ ID NO: 1324 - DNA, 19 bp, homo sapiens
  47miR-455-3p|0|-2
gcagtccatgggcatatac

SEQ ID NO: 1325 - DNA, 23 bp, homo sapiens
  47miR-455-3p|0|2
gcagtccatgggcatatacactt

SEQ ID NO: 1326 - DNA, 18 bp, homo sapiens
  47miR-455-3p|0|-3
gcagtccatgggcatata

SEQ ID NO: 1327 - DNA, 22 bp, homo sapiens
  47miR-455-3p|-1|0
tgcagtccatgggcatatacac

SEQ ID NO: 1328 - DNA, 21 bp, homo sapiens
  47miR-455-3p|-1|-1
tgcagtccatgggcatataca

SEQ ID NO: 1329 - DNA, 21 bp, homo sapiens
  47miR-455-3p|1|1
cagtccatgggcatatacact

SEQ ID NO: 1330 - DNA, 22 bp, homo sapiens
  47miR-455-3p|1|2
cagtccatgggcatatacactt

SEQ ID NO: 1331 - DNA, 23 bp, homo sapiens
  47miR-455-3p|-2|0
atgcagtccatgggcatatacac

SEQ ID NO: 1332 - DNA, 22 bp, homo sapiens
  47miR-455-3p|-2|-1
atgcagtccatgggcatataca

SEQ ID NO: 1333 - DNA, 21 bp, homo sapiens
  47miR-455-3p|-2|-2
atgcagtccatgggcatatac

SEQ ID NO: 1334 - DNA, 22 bp, homo sapiens
  47miR-582-3p|0|0
taactggttgaacaactgaacc

SEQ ID NO: 1335 - DNA, 21 bp, homo sapiens
  47miR-582-3p|0|-1
taactggttgaacaactgaac

SEQ ID NO: 1336 - DNA, 23 bp, homo sapiens
  47miR-582-3p|0|1
taactggttgaacaactgaaccc

SEQ ID NO: 1337 - DNA, 20 bp, homo sapiens
  47miR-582-3p|0|-2
taactggttgaacaactgaa

SEQ ID NO: 1338 - DNA, 24 bp, homo sapiens
  47miR-582-3p|0|2
taactggttgaacaactgaaccca

SEQ ID NO: 1339 - DNA, 19 bp, homo sapiens
  47miR-582-3p|0|-3
taactggttgaacaactga

SEQ ID NO: 1340 - DNA, 21 bp, homo sapiens
  47miR-582-3p|1|0
aactggttgaacaactgaacc

SEQ ID NO: 1341 - DNA, 22 bp, homo sapiens
  47miR-582-3p|-1|-1
gtaactggttgaacaactgaac

SEQ ID NO: 1342 - DNA, 20 bp, homo sapiens
  47miR-582-3p|1|-1
aactggttgaacaactgaac

SEQ ID NO: 1343 - DNA, 22 bp, homo sapiens
  47miR-582-3p|1|1
aactggttgaacaactgaaccc

SEQ ID NO: 1344 - DNA, 23 bp, homo sapiens
  47miR-582-3p|1|2
aactggttgaacaactgaaccca

SEQ ID NO: 1345 - DNA, 21 bp, homo sapiens
  47miR-582-3p|2|1
actggttgaacaactgaaccc

SEQ ID NO: 1346 - DNA, 22 bp, homo sapiens
  47miR-589-5p|0|0
tgagaaccacgtctgctctgag

SEQ ID NO: 1347 - DNA, 21 bp, homo sapiens
  47miR-589-5p|0|-1
tgagaaccacgtctgctctga

SEQ ID NO: 1348 - DNA, 23 bp, homo sapiens
  47miR-589-5p|0|1
tgagaaccacgtctgctctgagc

SEQ ID NO: 1349 - DNA, 20 bp, homo sapiens
  47miR-589-5p|0|-2
tgagaaccacgtctgctctg

SEQ ID NO: 1350 - DNA, 23 bp, homo sapiens
  miR-616-3p|-1|0
aagtcattggagggtttgagcag

SEQ ID NO: 1351 - DNA, 22 bp, homo sapiens
  miR-628-5p|0|0
atgctgacatatttactagagg

SEQ ID NO: 1352 - DNA, 21 bp, homo sapiens
  miR-628-5p|0|-1
atgctgacatatttactagag

SEQ ID NO: 1353 - DNA, 21 bp, homo sapiens
  miR-629-5p|0|0
tgggtttacgttgggagaact

SEQ ID NO: 1354 - DNA, 20 bp, homo sapiens
  miR-629-5p|0|-1
tgggtttacgttgggagaac

SEQ ID NO: 1355 - DNA, 22 bp, homo sapiens
  miR-629-5p|0|1
tgggtttacgttgggagaactt

SEQ ID NO: 1356 - DNA, 23 bp, homo sapiens
  miR-629-5p|0|2
tgggtttacgttgggagaacttt

SEQ ID NO: 1357 - DNA, 21 bp, homo sapiens
  miR-671-3p|0|0
tccggttctcagggctccacc

SEQ ID NO: 1358 - DNA, 22 bp, homo sapiens
  miR-671-3p|0|1
tccggttctcagggctccacct

SEQ ID NO: 1359 - DNA, 22 bp, homo sapiens
  miR-891a-5p|0|0
tgcaacgaacctgagccactga

SEQ ID NO: 1360 - DNA, 21 bp, homo sapiens
  miR-891a-5p|0|-1
tgcaacgaacctgagccactg

SEQ ID NO: 1361 - DNA, 21 bp, homo sapiens
  miR-450b-5p|0|-1
ttttgcaatatgttcctgaat

SEQ ID NO: 1362 - DNA, 22 bp, homo sapiens
  miR-874-3p|0|0
ctgccctggcccgagggaccga

SEQ ID NO: 1363 - DNA, 21 bp, homo sapiens
  miR-874-3p|0|-1
ctgccctggcccgagggaccg

SEQ ID NO: 1364 - DNA, 23 bp, homo sapiens
  miR-874-3p|0|1
ctgccctggcccgagggaccgac

SEQ ID NO: 1365 - DNA, 24 bp, homo sapiens
  miR-874-3p|0|2
ctgccctggcccgagggaccgact

SEQ ID NO: 1366 - DNA, 21 bp, homo sapiens
  miR-874-3p|1|0
tgccctggcccgagggaccga

SEQ ID NO: 1367 - DNA, 22 bp, homo sapiens
  miR-874-3p|1|1
tgccctggcccgagggaccgac

SEQ ID NO: 1368 - DNA, 23 bp, homo sapiens
  miR-874-3p|1|2
tgccctggcccgagggaccgact

SEQ ID NO: 1369 - DNA, 21 bp, homo sapiens
  miR-889-3p|0|0
ttaatatcggacaaccattgt

SEQ ID NO: 1370 - DNA, 23 bp, homo sapiens
  miR-708-5p|0|0
aaggagcttacaatctagctggg

SEQ ID NO: 1371 - DNA, 22 bp, homo sapiens
  miR-708-5p|0|-1
aaggagcttacaatctagctgg

SEQ ID NO: 1372 - DNA, 21 bp, homo sapiens
  miR-708-3p|0|-1
caactagactgtgagcttcta

SEQ ID NO: 1373 - DNA, 23 bp, homo sapiens
  miR-708-3p|0|1
caactagactgtgagcttctaga

SEQ ID NO: 1374 - DNA, 22 bp, homo sapiens
  miR-708-3p|1|1
aactagactgtgagcttctaga

SEQ ID NO: 1375 - DNA, 22 bp, homo sapiens
  miR-744-5p|0|0
tgcggggctagggctaacagca

SEQ ID NO: 1376 - DNA, 21 bp, homo sapiens
  miR-744-5p|0|-1
tgcggggctagggctaacagc

SEQ ID NO: 1377 - DNA, 23 bp, homo sapiens
  miR-744-5p|0|1
tgcggggctagggctaacagcag

SEQ ID NO: 1378 - DNA, 20 bp, homo sapiens
  miR-744-5p|0|-2
tgcggggctagggctaacag

SEQ ID NO: 1379 - DNA, 22 bp, homo sapiens
  miR-744-3p|0|0
ctgttgccactaacctcaacct

SEQ ID NO: 1380 - DNA, 21 bp, homo sapiens
  miR-744-3p|0|-1
ctgttgccactaacctcaacc

SEQ ID NO: 1381 - DNA, 23 bp, homo sapiens
  miR-877-5p|0|3
gtagaggagatggcgcaggggac

SEQ ID NO: 1382 - DNA, 24 bp, homo sapiens
  miR-877-5p|0|4
gtagaggagatggcgcaggggaca

SEQ ID NO: 1383 - DNA, 22 bp, homo sapiens
  miR-887-3p|0|0
gtgaacgggcgccatcccgagg

SEQ ID NO: 1384 - DNA, 23 bp, homo sapiens
  miR-887-3p|0|1
gtgaacgggcgccatcccgaggc

SEQ ID NO: 1385 - DNA, 24 bp, homo sapiens
  miR-887-3p|0|2
gtgaacgggcgccatcccgaggct

SEQ ID NO: 1386 - DNA, 22 bp, homo sapiens
  miR-374b-5p|0|0
atataatacaacctgctaagtg

SEQ ID NO: 1387 - DNA, 21 bp, homo sapiens
  miR-374b-5p|0|-1
atataatacaacctgctaagt

SEQ ID NO: 1388 - DNA, 23 bp, homo sapiens
  miR-374b-5p|0|1
atataatacaacctgctaagtgt

SEQ ID NO: 1389 - DNA, 20 bp, homo sapiens
  miR-374b-5p|0|-2
atataatacaacctgctaag

SEQ ID NO: 1390 - DNA, 22 bp, homo sapiens
  miR-374b-3p|0|0
cttagcaggttgtattatcatt

SEQ ID NO: 1391 - DNA, 22 bp, homo sapiens
  49miR-509-3-5p|0|0
tactgcagacgtggcaatcatg

SEQ ID NO: 1392 - DNA, 21 bp, homo sapiens
  49miR-509-3-5p|0|-1
tactgcagacgtggcaatcat

SEQ ID NO: 1393 - DNA, 23 bp, homo sapiens
  49miR-509-3-5p|0|1
tactgcagacgtggcaatcatgt

SEQ ID NO: 1394 - DNA, 22 bp, homo sapiens
  49miR-935|1|0
cagttaccgcttccgctaccgc

SEQ ID NO: 1395 - DNA, 21 bp, homo sapiens
  49miR-935|1|-1
cagttaccgcttccgctaccg

SEQ ID NO: 1396 - DNA, 22 bp, homo sapiens
  49miR-937-3p|0|0
atccgcgctctgactctctgcc

SEQ ID NO: 1397 - DNA, 21 bp, homo sapiens
  49miR-937-3p|0|-1
atccgcgctctgactctctgc

SEQ ID NO: 1398 - DNA, 22 bp, homo sapiens
  49miR-937-3p|-3|-3
cccatccgcgctctgactctct

SEQ ID NO: 1399 - DNA, 22 bp, homo sapiens
  49miR-942-5p|0|0
tcttctctgttttggccatgtg

SEQ ID NO: 1400 - DNA, 23 bp, homo sapiens
  49miR-942-5p|0|1
tcttctctgttttggccatgtgt

SEQ ID NO: 1401 - DNA, 22 bp, homo sapiens
  55miR-1226-3p|0|0
tcaccagccctgtgttccctag

SEQ ID NO: 1402 - DNA, 23 bp, homo sapiens
  55miR-1226-3p|0|1
tcaccagccctgtgttccctagg

SEQ ID NO: 1403 - DNA, 22 bp, homo sapiens
  57miR-513b-5p|0|0
ttcacaaggaggtgtcatttat

SEQ ID NO: 1404 - DNA, 22 bp, homo sapiens
  miR-513c-5p|0|0
ttctcaaggaggtgtcgtttat

SEQ ID NO: 1405 - DNA, 21 bp, homo sapiens
  miR-513c-5p|0|-1
ttctcaaggaggtgtcgttta

SEQ ID NO: 1406 - DNA, 20 bp, homo sapiens
  miR-513c-5p|0|-2
ttctcaaggaggtgtcgttt

SEQ ID NO: 1407 - DNA, 22 bp, homo sapiens
  57miR-320c|0|2
aaaagctgggttgagagggtag

SEQ ID NO: 1408 - DNA, 23 bp, homo sapiens
  57miR-320c|0|3
aaaagctgggttgagagggtaga

SEQ ID NO: 1409 - DNA, 22 bp, homo sapiens
  57miR-1296-5p|0|0
ttagggccctggctccatctcc

SEQ ID NO: 1410 - DNA, 23 bp, homo sapiens
  57miR-1296-5p|0|1
ttagggccctggctccatctcct

SEQ ID NO: 1411 - DNA, 24 bp, homo sapiens
  57miR-1296-5p|0|2
ttagggccctggctccatctcctt

SEQ ID NO: 1412 - DNA, 22 bp, homo sapiens
  57miR-1271-5p|0|0
cttggcacctagcaagcactca

SEQ ID NO: 1413 - DNA, 21 bp, homo sapiens
  57miR-1271-5p|0|-1
cttggcacctagcaagcactc

SEQ ID NO: 1414 - DNA, 24 bp, homo sapiens
  57miR-1301-3p|0|0
ttgcagctgcctgggagtgacttc

SEQ ID NO: 1415 - DNA, 23 bp, homo sapiens
  57miR-1301-3p|0|-1
ttgcagctgcctgggagtgactt

SEQ ID NO: 1416 - DNA, 25 bp, homo sapiens
  57miR-1301-3p|0|1
ttgcagctgcctgggagtgacttca

SEQ ID NO: 1417 - DNA, 22 bp, homo sapiens
  57miR-1301-3p|0|-2
ttgcagctgcctgggagtgact

SEQ ID NO: 1418 - DNA, 21 bp, homo sapiens
  57miR-1301-3p|0|-3
ttgcagctgcctgggagtgac

SEQ ID NO: 1419 - DNA, 20 bp, homo sapiens
  57miR-1301-3p|0|-4
ttgcagctgcctgggagtga

SEQ ID NO: 1420 - DNA, 22 bp, homo sapiens
  miR-1180-3p|0|0
tttccggctcgcgtgggtgtgt

SEQ ID NO: 1421 - DNA, 21 bp, homo sapiens
  miR-1180-3p|0|-1
tttccggctcgcgtgggtgtg

SEQ ID NO: 1422 - DNA, 23 bp, homo sapiens
  miR-1180-3p|0|1
tttccggctcgcgtgggtgtgtc

SEQ ID NO: 1423 - DNA, 20 bp, homo sapiens
  miR-1180-3p|0|-2
tttccggctcgcgtgggtgt

SEQ ID NO: 1424 - DNA, 22 bp, homo sapiens
  58miR-1287-5p|0|0
tgctggatcagtggttcgagtc

SEQ ID NO: 1425 - DNA, 19 bp, homo sapiens
  58miR-1287-5p|0|-3
tgctggatcagtggttcga

SEQ ID NO: 1426 - DNA, 22 bp, homo sapiens
  58miR-1247-5p|0|0
acccgtcccgttcgtccccgga

SEQ ID NO: 1427 - DNA, 22 bp, homo sapiens
  miR-1249|0|0
acgcccttcccccccttcttca

SEQ ID NO: 1428 - DNA, 21 bp, homo sapiens
  miR-1249|0|-1
acgcccttcccccccttcttc

SEQ ID NO: 1429 - DNA, 20 bp, homo sapiens
  miR-1260a|0|2
atcccacctctgccaccaaa

SEQ ID NO: 1430 - DNA, 23 bp, homo sapiens
  miR-1266-5p|0|0
cctcagggctgtagaacagggct

SEQ ID NO: 1431 - DNA, 22 bp, homo sapiens
  miR-1266-5p|0|-1
cctcagggctgtagaacagggc

SEQ ID NO: 1432 - DNA, 24 bp, homo sapiens
  miR-1266-5p|0|1
cctcagggctgtagaacagggctg

SEQ ID NO: 1433 - DNA, 22 bp, homo sapiens
  miR-1307-3p|0|0
actcggcgtggcgtcggtcgtg

SEQ ID NO: 1434 - DNA, 21 bp, homo sapiens
  miR-1307-3p|0|-1
actcggcgtggcgtcggtcgt

SEQ ID NO: 1435 - DNA, 23 bp, homo sapiens
  miR-1307-3p|0|1
actcggcgtggcgtcggtcgtgg

SEQ ID NO: 1436 - DNA, 20 bp, homo sapiens
  miR-1307-3p|0|-2
actcggcgtggcgtcggtcg

SEQ ID NO: 1437 - DNA, 24 bp, homo sapiens
  miR-1307-3p|0|2
actcggcgtggcgtcggtcgtggt

SEQ ID NO: 1438 - DNA, 25 bp, homo sapiens
  miR-1307-3p|0|3
actcggcgtggcgtcggtcgtggta

SEQ ID NO: 1439 - DNA, 26 bp, homo sapiens
  miR-1307-3p|0|4
actcggcgtggcgtcggtcgtggtag

SEQ ID NO: 1440 - DNA, 21 bp, homo sapiens
  miR-1307-3p|1|0
ctcggcgtggcgtcggtcgtg

SEQ ID NO: 1441 - DNA, 22 bp, homo sapiens
  miR-1307-3p|1|1
ctcggcgtggcgtcggtcgtgg

SEQ ID NO: 1442 - DNA, 23 bp, homo sapiens
  miR-1307-3p|1|2
ctcggcgtggcgtcggtcgtggt

SEQ ID NO: 1443 - DNA, 24 bp, homo sapiens
  miR-1307-3p|1|3
ctcggcgtggcgtcggtcgtggta

SEQ ID NO: 1444 - DNA, 25 bp, homo sapiens
  miR-1307-3p|1|4
ctcggcgtggcgtcggtcgtggtag

SEQ ID NO: 1445 - DNA, 22 bp, homo sapiens
  miR-1468-5p|0|1
ctccgtttgcctgtttcgctga

SEQ ID NO: 1446 - DNA, 22 bp, homo sapiens
  67miR-675-3p|0|2
ctgtatgccctcaccgctcagc

SEQ ID NO: 1447 - DNA, 21 bp, homo sapiens
  miR-151b|0|3
tcgaggagctcacagtctaga

SEQ ID NO: 1448 - DNA, 22 bp, homo sapiens
  miR-151b|-1|3
ctcgaggagctcacagtctaga

SEQ ID NO: 1449 - DNA, 22 bp, homo sapiens
  149miR-378b|0|3
actggacttggaggcagaaaga

SEQ ID NO: 1450 - DNA, 21 bp, homo sapiens
  149miR-378b|1|3
ctggacttggaggcagaaaga

SEQ ID NO: 1451 - DNA, 22 bp, homo sapiens
  miR-3161|0|-1
ctgataagaacagaggcccaga

SEQ ID NO: 1452 - DNA, 22 bp, homo sapiens
  miR-3170|0|0
ctggggttctgagacagacagt

SEQ ID NO: 1453 - DNA, 23 bp, homo sapiens
  150miR-3200-3p|0|1
caccttgcgctactcaggtctgc

SEQ ID NO: 1454 - DNA, 23 bp, homo sapiens
  miR-378c|0|-2
actggacttggagtcagaagagt

SEQ ID NO: 1455 - DNA, 22 bp, homo sapiens
  miR-378c|0|-3
actggacttggagtcagaagag

SEQ ID NO: 1456 - DNA, 21 bp, homo sapiens
  miR-378c|0|-4
actggacttggagtcagaaga

SEQ ID NO: 1457 - DNA, 22 bp, homo sapiens
  miR-378c|-1|-4
cactggacttggagtcagaaga

SEQ ID NO: 1458 - DNA, 20 bp, homo sapiens
  miR-378c|1|-4
ctggacttggagtcagaaga

SEQ ID NO: 1459 - DNA, 21 bp, homo sapiens
  miR-378c|-1|-5
cactggacttggagtcagaag

SEQ ID NO: 1460 - DNA, 22 bp, homo sapiens
  miR-378d|0|2
actggacttggagtcagaaaca

SEQ ID NO: 1461 - DNA, 22 bp, homo sapiens
  189miR-4454|-2|0
ccggatccgagtcacggcacca

SEQ ID NO: 1462 - DNA, 20 bp, homo sapiens
  miR-4510|0|-2
tgagggagtaggatgtatgg

SEQ ID NO: 1463 - DNA, 23 bp, homo sapiens
  miR-378i|0|2
actggactaggagtcagaaggtg

SEQ ID NO: 1464 - DNA, 22 bp, homo sapiens
  miR-378i|1|2
ctggactaggagtcagaaggtg

SEQ ID NO: 1465 - DNA, 23 bp, homo sapiens
  miR-378i|1|3
ctggactaggagtcagaaggtgg

SEQ ID NO: 1466 - DNA, 22 bp, homo sapiens
  197miR-1343-3p|0|0
ctcctggggcccgcactctcgc

SEQ ID NO: 1467 - DNA, 20 bp, homo sapiens
  226miR-181b-3p|0|-1
ctcactgaacaatgaatgca

SEQ ID NO: 1468 - DNA, 21 bp, homo sapiens
  226miR-211-3p|0|0
gcagggacagcaaaggggtgc

SEQ ID NO: 1469 - DNA, 23 bp, homo sapiens
  226miR-212-5p|0|0
accttggctctagactgcttact

SEQ ID NO: 1470 - DNA, 22 bp, homo sapiens
  22miR-659-5p|0|0
aggaccttccctgaaccaagga

SEQ ID NO: 1471 - DNA, 22 bp, homo sapiens
  miR-1304-3p|0|0
tctcactgtagcctcgaacccc

SEQ ID NO: 1472 - DNA, 21 bp, homo sapiens
  miR-1304-3p|0|-1
tctcactgtagcctcgaaccc

SEQ ID NO: 1473 - DNA, 23 bp, homo sapiens
  miR-1304-3p|0|1
tctcactgtagcctcgaacccct

SEQ ID NO: 1474 - DNA, 20 bp, homo sapiens
  miR-1304-3p|0|-2
tctcactgtagcctcgaacc

SEQ ID NO: 1475 - DNA, 22 bp, homo sapiens
  miR-1306-5p|0|0
ccacctcccctgcaaacgtcca

SEQ ID NO: 1476 - DNA, 21 bp, homo sapiens
  miR-1306-5p|0|-1
ccacctcccctgcaaacgtcc

SEQ ID NO: 1477 - DNA, 23 bp, homo sapiens
  miR-1306-5p|0|1
ccacctcccctgcaaacgtccag

SEQ ID NO: 1478 - DNA, 21 bp, homo sapiens
  22miR-1307-5p|0|0
tcgaccggacctcgaccggct

SEQ ID NO: 1479 - DNA, 20 bp, homo sapiens
  22miR-1307-5p|0|-1
tcgaccggacctcgaccggc

SEQ ID NO: 1480 - DNA, 22 bp, homo sapiens
  22miR-1307-5p|0|1
tcgaccggacctcgaccggctc

SEQ ID NO: 1481 - DNA, 19 bp, homo sapiens
  22miR-1307-5p|0|-2
tcgaccggacctcgaccgg

SEQ ID NO: 1482 - DNA, 23 bp, homo sapiens
  22miR-1307-5p|0|2
tcgaccggacctcgaccggctcg

SEQ ID NO: 1483 - DNA, 22 bp, homo sapiens
  miR-365b-3p|0|0
taatgcccctaaaaatccttat

SEQ ID NO: 1484 - DNA, 21 bp, homo sapiens
  miR-6715a-3p|0|0
ccaaaccagtcgtgcctgtgg

SEQ ID NO: 1485 - DNA, 22 bp, homo sapiens
  miR-6715a-3p|0|1
ccaaaccagtcgtgcctgtggg

SEQ ID NO: 1486 - DNA, 22 bp, homo sapiens
  miR-6720-3p|0|0
cgcgcctgcaggaactggtaga

SEQ ID NO: 1487 - DNA, 21 bp, homo sapiens
  miR-6720-3p|0|-1
cgcgcctgcaggaactggtag

SEQ ID NO: 1488 - DNA, 22 bp, homo sapiens
  264let-7c-3p|0|0
ctgtacaaccttctagctttcc

SEQ ID NO: 1489 - DNA, 21 bp, homo sapiens
  264let-7c-3p|0|-1
ctgtacaaccttctagctttc

SEQ ID NO: 1490 - DNA, 23 bp, homo sapiens
  264let-7c-3p|0|1
ctgtacaaccttctagctttcct

SEQ ID NO: 1491 - DNA, 23 bp, homo sapiens
  264miR-128-1-5p|0|0
cggggccgtagcactgtctgaga

SEQ ID NO: 1492 - DNA, 22 bp, homo sapiens
  264miR-128-1-5p|0|-1
cggggccgtagcactgtctgag

SEQ ID NO: 1493 - DNA, 21 bp, homo sapiens
  264miR-128-1-5p|0|-2
cggggccgtagcactgtctga

SEQ ID NO: 1494 - DNA, 21 bp, homo sapiens
  264miR-153-5p|-1|-2
gtcatttttgtgatgttgcag

SEQ ID NO: 1495 - DNA, 23 bp, homo sapiens
  miR-874-5p|0|0
cggccccacgcaccagggtaaga

SEQ ID NO: 1496 - DNA, 23 bp, homo sapiens
  miR-500b-3p|-2|1
gtgcacccaggcaaggattctgc

SEQ ID NO: 1497 - DNA, 23 bp, homo sapiens
  miR-500b-3p|-3|0
agtgcacccaggcaaggattctg

SEQ ID NO: 1498 - DNA, 24 bp, homo sapiens
  miR-7706|0|0
tgaagcgcctgtgctctgccgaga

SEQ ID NO: 1499 - DNA, 18 bp, homo sapiens
  00107.3p-miR|4|2
tggggcgcgaagcggggg

SEQ ID NO: 1500 - DNA, 23 bp, homo sapiens
  00121.5p-miR|0|0
cgggcggcgggcggcggggcggg

SEQ ID NO: 1501 - DNA, 22 bp, homo sapiens
  00121.5p-miR|0|-1
cgggcggcgggcggcggggcgg

SEQ ID NO: 1502 - DNA, 24 bp, homo sapiens
  00121.5p-miR|0|1
cgggcggcgggcggcggggcgggg

SEQ ID NO: 1503 - DNA, 21 bp, homo sapiens
  00121.5p-miR|0|-2
cgggcggcgggcggcggggcg

SEQ ID NO: 1504 - DNA, 25 bp, homo sapiens
  00121.5p-miR|0|2
cgggcggcgggcggcggggcggggc

SEQ ID NO: 1505 - DNA, 26 bp, homo sapiens
  00121.5p-miR|0|3
cgggcggcgggcggcggggcggggcg

SEQ ID NO: 1506 - DNA, 27 bp, homo sapiens
  00121.5p-miR|0|4
cgggcggcgggcggcggggcggggcgg

SEQ ID NO: 1507 - DNA, 24 bp, homo sapiens
  00121.5p-miR|-1|0
gcgggcggcgggcggcggggcggg

SEQ ID NO: 1508 - DNA, 22 bp, homo sapiens
  00121.5p-miR|1|0
gggcggcgggcggcggggcggg

SEQ ID NO: 1509 - DNA, 23 bp, homo sapiens
  00121.5p-miR|-1|-1
gcgggcggcgggcggcggggcgg

SEQ ID NO: 1510 - DNA, 21 bp, homo sapiens
  00121.5p-miR|1|-1
gggcggcgggcggcggggcgg

SEQ ID NO: 1511 - DNA, 23 bp, homo sapiens
  00121.5p-miR|1|1
gggcggcgggcggcggggcgggg

SEQ ID NO: 1512 - DNA, 22 bp, homo sapiens
  00121.5p-miR|-1|-2
gcgggcggcgggcggcggggcg

SEQ ID NO: 1513 - DNA, 26 bp, homo sapiens
  00121.5p-miR|-1|2
gcgggcggcgggcggcggggcggggc

SEQ ID NO: 1514 - DNA, 24 bp, homo sapiens
  00121.5p-miR|1|2
gggcggcgggcggcggggcggggc

SEQ ID NO: 1515 - DNA, 27 bp, homo sapiens
  00121.5p-miR|-1|3
gcgggcggcgggcggcggggcggggcg

SEQ ID NO: 1516 - DNA, 25 bp, homo sapiens
  00121.5p-miR|1|3
gggcggcgggcggcggggcggggcg

SEQ ID NO: 1517 - DNA, 28 bp, homo sapiens
  00121.5p-miR|-1|4
gcgggcggcgggcggcggggcggggcgg

SEQ ID NO: 1518 - DNA, 26 bp, homo sapiens
  00121.5p-miR|1|4
gggcggcgggcggcggggcggggcgg

SEQ ID NO: 1519 - DNA, 25 bp, homo sapiens
  00121.5p-miR|-2|0
ggcgggcggcgggcggcggggcggg

SEQ ID NO: 1520 - DNA, 23 bp, homo sapiens
  00121.5p-miR|-2|-2
ggcgggcggcgggcggcggggcg

SEQ ID NO: 1521 - DNA, 27 bp, homo sapiens
  00121.5p-miR|-2|2
ggcgggcggcgggcggcggggcggggc

SEQ ID NO: 1522 - DNA, 26 bp, homo sapiens
  00121.5p-miR|-3|0
cggcgggcggcgggcggcggggcggg

SEQ ID NO: 1523 - DNA, 24 bp, homo sapiens
  00121.5p-miR|-3|-2
cggcgggcggcgggcggcggggcg

SEQ ID NO: 1524 - DNA, 23 bp, homo sapiens
  00400.5p-miR|0|0
agcttctttacagtgttgccttg

SEQ ID NO: 1525 - DNA, 21 bp, homo sapiens
  00476.3p-miR|0|1
gccgccatgatcatccctgta

SEQ ID NO: 1526 - DNA, 20 bp, homo sapiens
  00600.3p-miR|0|-1
cgccgcgccggggaggggga

SEQ ID NO: 1527 - DNA, 22 bp, homo sapiens
  00648.5p-miR|0|0
ggagggggcgggctccggcggg

SEQ ID NO: 1528 - DNA, 20 bp, homo sapiens
  00648.5p-miR|0|-2
ggagggggcgggctccggcg

SEQ ID NO: 1529 - DNA, 21 bp, homo sapiens
  00648.5p-miR|1|0
gagggggcgggctccggcggg

SEQ ID NO: 1530 - DNA, 20 bp, homo sapiens
  00648.5p-miR|2|0
agggggcgggctccggcggg

SEQ ID NO: 1531 - DNA, 22 bp, homo sapiens
  01678.5p-miR|0|0
tctgctcctggctggctcgcca

SEQ ID NO: 1532 - DNA, 22 bp, homo sapiens
  02138.5p-miR|0|0
tcaggatcaggatctgcagagt

SEQ ID NO: 1533 - DNA, 23 bp, homo sapiens
  02236.3p-miR|0|0
gatgcctgggagttgcgatctgc

SEQ ID NO: 1534 - DNA, 22 bp, homo sapiens
  02236.3p-miR|0|-1
gatgcctgggagttgcgatctg

SEQ ID NO: 1535 - DNA, 24 bp, homo sapiens
  02236.3p-miR|0|1
gatgcctgggagttgcgatctgcc

SEQ ID NO: 1536 - DNA, 26 bp, homo sapiens
  02236.3p-miR|0|3
gatgcctgggagttgcgatctgcccg

SEQ ID NO: 1537 - DNA, 27 bp, homo sapiens
  02236.3p-miR|-1|3
ggatgcctgggagttgcgatctgcccg

SEQ ID NO: 1538 - DNA, 25 bp, homo sapiens
  02236.3p-miR|1|3
atgcctgggagttgcgatctgcccg

SEQ ID NO: 1539 - DNA, 24 bp, homo sapiens
  02236.3p-miR|2|3
tgcctgggagttgcgatctgcccg

SEQ ID NO: 1540 - DNA, 22 bp, homo sapiens
  02603.3p-miR|0|-1
gggcgcgcgcgtcggggcggcg

SEQ ID NO: 1541 - DNA, 22 bp, homo sapiens
  02606.5p-miR|0|0
ttccttgacctgatgctgtagg

SEQ ID NO: 1542 - DNA, 21 bp, homo sapiens
  02606.5p-miR|0|-1
ttccttgacctgatgctgtag

SEQ ID NO: 1543 - DNA, 23 bp, homo sapiens
  02606.5p-miR|-1|0
tttccttgacctgatgctgtagg

SEQ ID NO: 1544 - DNA, 23 bp, homo sapiens
  02736.5p-miR|0|0
ggcttctttacagtgctgccttg

SEQ ID NO: 1545 - DNA, 20 bp, homo sapiens
  02743.5p-miR|0|0
gccccgggccggtcgcgccg

SEQ ID NO: 1546 - DNA, 20 bp, homo sapiens
  02772.5p-miR|1|0
ctcgatcttgggacccaccg

SEQ ID NO: 1547 - DNA, 22 bp, homo sapiens
  03061.3p-miR|0|0
tactctctcggacaagctgtag

SEQ ID NO: 1548 - DNA, 23 bp, homo sapiens
  03061.3p-miR|0|1
tactctctcggacaagctgtagg

SEQ ID NO: 1549 - DNA, 24 bp, homo sapiens
  03061.3p-miR|0|2
tactctctcggacaagctgtaggt

SEQ ID NO: 1550 - DNA, 21 bp, homo sapiens
  03061.3p-miR|1|0
actctctcggacaagctgtag

SEQ ID NO: 1551 - DNA, 22 bp, homo sapiens
  03061.3p-miR|1|1
actctctcggacaagctgtagg

SEQ ID NO: 1552 - DNA, 23 bp, homo sapiens
  03061.3p-miR|1|2
actctctcggacaagctgtaggt

SEQ ID NO: 1553 - DNA, 22 bp, homo sapiens
  03061.3p-miR|3|3
tctctcggacaagctgtaggtc

SEQ ID NO: 1554 - DNA, 21 bp, homo sapiens
  03061.5p-miR|0|0
aattacagattgtctcagaga

SEQ ID NO: 1555 - DNA, 20 bp, homo sapiens
  03061.5p-miR|0|-1
aattacagattgtctcagag

SEQ ID NO: 1556 - DNA, 22 bp, homo sapiens
  03061.5p-miR|0|1
aattacagattgtctcagagaa

SEQ ID NO: 1557 - DNA, 23 bp, homo sapiens
  03061.5p-miR|0|2
aattacagattgtctcagagaaa

SEQ ID NO: 1558 - DNA, 22 bp, homo sapiens
  03061.5p-miR|-1|0
aaattacagattgtctcagaga

SEQ ID NO: 1559 - DNA, 22 bp, homo sapiens
  03170.3p-miR|0|0
ttatcctccagtagactaggga

SEQ ID NO: 1560 - DNA, 20 bp, homo sapiens
  03306.3p-miR|0|-1
agggcgcgcggggcggggcg

SEQ ID NO: 1561 - DNA, 19 bp, homo sapiens
  03306.3p-miR|0|-2
agggcgcgcggggcggggc

SEQ ID NO: 1562 - DNA, 22 bp, homo sapiens
  ID00033.5p-miR|0|0
cctggaaagactttgacagcgc

SEQ ID NO: 1563 - DNA, 24 bp, homo sapiens
  ID00051.5p-miR|0|0
ctcagtgatgaaaactttgtccag

SEQ ID NO: 1564 - DNA, 25 bp, homo sapiens
  ID00051.5p-miR|0|1
ctcagtgatgaaaactttgtccagt

SEQ ID NO: 1565 - DNA, 19 bp, homo sapiens
  ID00051.5p-miR|0|-5
ctcagtgatgaaaactttg

SEQ ID NO: 1566 - DNA, 20 bp, homo sapiens
  ID00051.5p-miR|-1|-5
tctcagtgatgaaaactttg

SEQ ID NO: 1567 - DNA, 21 bp, homo sapiens
  ID00052.3p-miR|0|0
gaagataaagtgtgtctgagg

SEQ ID NO: 1568 - DNA, 22 bp, homo sapiens
  ID00052.3p-miR|-1|0
tgaagataaagtgtgtctgagg

SEQ ID NO: 1569 - DNA, 20 bp, homo sapiens
  ID00052.3p-miR|1|0
aagataaagtgtgtctgagg

SEQ ID NO: 1570 - DNA, 23 bp, homo sapiens
  ID00052.3p-miR|-2|0
gtgaagataaagtgtgtctgagg

SEQ ID NO: 1571 - DNA, 19 bp, homo sapiens
  ID00052.3p-miR|2|0
agataaagtgtgtctgagg

SEQ ID NO: 1572 - DNA, 24 bp, homo sapiens
  ID00052.3p-miR|-3|0
agtgaagataaagtgtgtctgagg

SEQ ID NO: 1573 - DNA, 25 bp, homo sapiens
  ID00052.3p-miR|-4|0
aagtgaagataaagtgtgtctgagg

SEQ ID NO: 1574 - DNA, 22 bp, homo sapiens
  ID00090.3p-miR|0|0
tctgatcgttcccctccgtaca

SEQ ID NO: 1575 - DNA, 23 bp, homo sapiens
  ID00090.3p-miR|0|1
gtctgatcgttcccctccgtaca

SEQ ID NO: 1576 - DNA, 21 bp, homo sapiens
  ID00090.3p-miR|0|-1
ctgatcgttcccctccgtaca

SEQ ID NO: 1577 - DNA, 24 bp, homo sapiens
  ID00090.3p-miR|0|2
agtctgatcgttcccctccgtaca

SEQ ID NO: 1578 - DNA, 20 bp, homo sapiens
  ID00090.5p-miR|0|0
tatggaggtctctgtctggc

SEQ ID NO: 1579 - DNA, 21 bp, homo sapiens
  ID00090.5p-miR|0|1
atatggaggtctctgtctggc

SEQ ID NO: 1580 - DNA, 22 bp, homo sapiens
  ID00090.5p-miR|0|2
tatatggaggtctctgtctggc

SEQ ID NO: 1581 - DNA, 23 bp, homo sapiens
  ID00090.5p-miR|0|3
atatatggaggtctctgtctggc

SEQ ID NO: 1582 - DNA, 21 bp, homo sapiens
  ID00090.5p-miR|-1|0
tatggaggtctctgtctggct

SEQ ID NO: 1583 - DNA, 22 bp, homo sapiens
  ID00090.5p-miR|-1|1
atatggaggtctctgtctggct

SEQ ID NO: 1584 - DNA, 21 bp, homo sapiens
  ID00130.3p-miR|0|0
gttggtgatgacatacctgga

SEQ ID NO: 1585 - DNA, 25 bp, homo sapiens
  ID00142.5p-miR|0|1
aaggtgccattctgagggccaggag

SEQ ID NO: 1586 - DNA, 22 bp, homo sapiens
  ID00148.3p-miR|0|0
aatgctgccagtctccttcaga

SEQ ID NO: 1587 - DNA, 20 bp, homo sapiens
  ID00149.5p-miR|0|0
gtgcacatttcattgacctg

SEQ ID NO: 1588 - DNA, 22 bp, homo sapiens
  ID00168.3p-miR|1|0
agtcaccaggttagagacatgc

SEQ ID NO: 1589 - DNA, 21 bp, homo sapiens
  ID00168.3p-miR|2|0
gtcaccaggttagagacatgc

SEQ ID NO: 1590 - DNA, 19 bp, homo sapiens
  ID00168.3p-miR|4|0
caccaggttagagacatgc

SEQ ID NO: 1591 - DNA, 23 bp, homo sapiens
  ID00173.5p-miR|0|0
aggagggacgtggcgctctgaga

SEQ ID NO: 1592 - DNA, 22 bp, homo sapiens
  ID00202.5p-miR|0|0
gttctctataggaagccatagc

SEQ ID NO: 1593 - DNA, 23 bp, homo sapiens
  ID00286.3p-miR|0|0
gctacttttaaattctgacctca

SEQ ID NO: 1594 - DNA, 22 bp, homo sapiens
  ID00286.3p-miR|0|-1
ctacttttaaattctgacctca

SEQ ID NO: 1595 - DNA, 24 bp, homo sapiens
  ID00353.3p-miR|0|0
aatgattttgtggaagttctgatt

SEQ ID NO: 1596 - DNA, 25 bp, homo sapiens
  ID00353.3p-miR|-1|0
aatgattttgtggaagttctgattt

SEQ ID NO: 1597 - DNA, 23 bp, homo sapiens
  ID00353.3p-miR|1|0
aatgattttgtggaagttctgat

SEQ ID NO: 1598 - DNA, 26 bp, homo sapiens
  ID00353.3p-miR|-2|0
aatgattttgtggaagttctgattta

SEQ ID NO: 1599 - DNA, 22 bp, homo sapiens
  ID00353.3p-miR|2|0
aatgattttgtggaagttctga

SEQ ID NO: 1600 - DNA, 21 bp, homo sapiens
  ID00353.3p-miR|3|0
aatgattttgtggaagttctg

SEQ ID NO: 1601 - DNA, 20 bp, homo sapiens
  ID00353.3p-miR|4|0
aatgattttgtggaagttct

SEQ ID NO: 1602 - DNA, 21 bp, homo sapiens
  ID00365.3p-miR|0|0
agacctacttatctaccaaca

SEQ ID NO: 1603 - DNA, 22 bp, homo sapiens
  ID00365.3p-miR|0|1
agacctacttatctaccaacag

SEQ ID NO: 1604 - DNA, 23 bp, homo sapiens
  ID00365.3p-miR|0|2
agacctacttatctaccaacagc

SEQ ID NO: 1605 - DNA, 22 bp, homo sapiens
  ID00365.5p-miR|0|0
aaggtagatagaacaggtcttg

SEQ ID NO: 1606 - DNA, 23 bp, homo sapiens
  ID00365.5p-miR|0|1
aaggtagatagaacaggtcttgt

SEQ ID NO: 1607 - DNA, 21 bp, homo sapiens
  ID00365.5p-miR|0|-1
aaggtagatagaacaggtctt

SEQ ID NO: 1608 - DNA, 24 bp, homo sapiens
  ID00365.5p-miR|0|2
aaggtagatagaacaggtcttgtt

SEQ ID NO: 1609 - DNA, 21 bp, homo sapiens
  ID00365.5p-miR|1|0
aggtagatagaacaggtcttg

SEQ ID NO: 1610 - DNA, 22 bp, homo sapiens
  ID00365.5p-miR|1|1
aggtagatagaacaggtcttgt

SEQ ID NO: 1611 - DNA, 23 bp, homo sapiens
  ID00365.5p-miR|1|2
aggtagatagaacaggtcttgtt

SEQ ID NO: 1612 - DNA, 21 bp, homo sapiens
  ID00406.5p-miR|0|0
aagcactgcctttgaacctga

SEQ ID NO: 1613 - DNA, 23 bp, homo sapiens
  ID00406.5p-miR|0|2
ataagcactgcctttgaacctga

SEQ ID NO: 1614 - DNA, 24 bp, homo sapiens
  ID00406.5p-miR|0|3
cataagcactgcctttgaacctga

SEQ ID NO: 1615 - DNA, 23 bp, homo sapiens
  ID00587.5p-miR|0|0
agatgacctggtcaccgtgtggt

SEQ ID NO: 1616 - DNA, 23 bp, homo sapiens
  ID00676.3p-miR|0|0
tttagctgtattgtgagacattc

SEQ ID NO: 1617 - DNA, 24 bp, homo sapiens
  ID00677.3p-miR|0|0
cctctagatagtcaagttctgatc

SEQ ID NO: 1618 - DNA, 25 bp, homo sapiens
  ID00677.3p-miR|-1|0
cctctagatagtcaagttctgatcc

SEQ ID NO: 1619 - DNA, 23 bp, homo sapiens
  ID00677.3p-miR|1|0
cctctagatagtcaagttctgat

SEQ ID NO: 1620 - DNA, 22 bp, homo sapiens
  ID00677.3p-miR|2|0
cctctagatagtcaagttctga

SEQ ID NO: 1621 - DNA, 25 bp, homo sapiens
  ID00677.3p-miR|2|3
attcctctagatagtcaagttctga

SEQ ID NO: 1622 - DNA, 24 bp, homo sapiens
  ID00677.3p-miR|3|3
attcctctagatagtcaagttctg

SEQ ID NO: 1623 - DNA, 23 bp, homo sapiens
  ID00677.3p-miR|4|3
attcctctagatagtcaagttct

SEQ ID NO: 1624 - DNA, 21 bp, homo sapiens
  ID00701.3p-miR|0|0
ctctggagctttcgtacatgc

SEQ ID NO: 1625 - DNA, 22 bp, homo sapiens
  ID00701.3p-miR|-1|0
ctctggagctttcgtacatgcc

SEQ ID NO: 1626 - DNA, 20 bp, homo sapiens
  ID00701.3p-miR|1|0
ctctggagctttcgtacatg

SEQ ID NO: 1627 - DNA, 23 bp, homo sapiens
  ID00701.3p-miR|-2|0
ctctggagctttcgtacatgcct

SEQ ID NO: 1628 - DNA, 19 bp, homo sapiens
  ID00701.3p-miR|2|0
ctctggagctttcgtacat

SEQ ID NO: 1629 - DNA, 24 bp, homo sapiens
  ID00701.3p-miR|-3|0
ctctggagctttcgtacatgcctt

SEQ ID NO: 1630 - DNA, 25 bp, homo sapiens
  ID00701.3p-miR|-4|0
ctctggagctttcgtacatgccttt

SEQ ID NO: 1631 - DNA, 24 bp, homo sapiens
  ID00707.3p-miR|0|0
actattggccagttttgtctgatg

SEQ ID NO: 1632 - DNA, 25 bp, homo sapiens
  ID00707.3p-miR|-1|0
cactattggccagttttgtctgatg

SEQ ID NO: 1633 - DNA, 23 bp, homo sapiens
  ID00707.3p-miR|1|0
ctattggccagttttgtctgatg

SEQ ID NO: 1634 - DNA, 26 bp, homo sapiens
  ID00707.3p-miR|-2|0
acactattggccagttttgtctgatg

SEQ ID NO: 1635 - DNA, 22 bp, homo sapiens
  ID00707.3p-miR|2|0
tattggccagttttgtctgatg

SEQ ID NO: 1636 - DNA, 21 bp, homo sapiens
  ID00751.3p-miR|0|0
tttccagatggagggctgttt

SEQ ID NO: 1637 - DNA, 22 bp, homo sapiens
  ID00751.3p-miR|0|1
gtttccagatggagggctgttt

SEQ ID NO: 1638 - DNA, 23 bp, homo sapiens
  ID00831.3p-miR|0|0
aaattgcaggactctaaacattt

SEQ ID NO: 1639 - DNA, 24 bp, homo sapiens
  ID00831.3p-miR|-1|0
aaattgcaggactctaaacatttc

SEQ ID NO: 1640 - DNA, 22 bp, homo sapiens
  ID00831.3p-miR|1|0
aaattgcaggactctaaacatt

SEQ ID NO: 1641 - DNA, 25 bp, homo sapiens
  ID00831.3p-miR|-2|0
aaattgcaggactctaaacatttcc

SEQ ID NO: 1642 - DNA, 21 bp, homo sapiens
  ID00831.3p-miR|2|0
aaattgcaggactctaaacat

SEQ ID NO: 1643 - DNA, 20 bp, homo sapiens
  ID00831.3p-miR|3|0
aaattgcaggactctaaaca

SEQ ID NO: 1644 - DNA, 19 bp, homo sapiens
  ID00831.3p-miR|4|0
aaattgcaggactctaaac

SEQ ID NO: 1645 - DNA, 20 bp, homo sapiens
  ID00947.3p-miR|0|0
catgtcctgcaattctgaag

SEQ ID NO: 1646 - DNA, 21 bp, homo sapiens
  ID00947.3p-miR|-1|0
catgtcctgcaattctgaagg

SEQ ID NO: 1647 - DNA, 18 bp, homo sapiens
  ID00947.3p-miR|2|0
catgtcctgcaattctga

SEQ ID NO: 1648 - DNA, 23 bp, homo sapiens
  ID00947.3p-miR|-3|0
catgtcctgcaattctgaaggga

SEQ ID NO: 1649 - DNA, 25 bp, homo sapiens
  ID00947.3p-miR|-5|0
catgtcctgcaattctgaagggatt

SEQ ID NO: 1650 - DNA, 22 bp, homo sapiens
  ID01010.3p-miR|0|0
attgccagagggttctgtgagt

SEQ ID NO: 1651 - DNA, 24 bp, homo sapiens
  ID01011.5p-miR|0|0
gccaaggatgagaactctaatctg

SEQ ID NO: 1652 - DNA, 26 bp, homo sapiens
  ID01011.5p-miR|0|2
gccaaggatgagaactctaatctgat

SEQ ID NO: 1653 - DNA, 27 bp, homo sapiens
  ID01011.5p-miR|0|3
gccaaggatgagaactctaatctgatt

SEQ ID NO: 1654 - DNA, 19 bp, homo sapiens
  ID01011.5p-miR|0|-5
gccaaggatgagaactcta

SEQ ID NO: 1655 - DNA, 25 bp, homo sapiens
  ID01011.5p-miR|-1|0
ggccaaggatgagaactctaatctg

SEQ ID NO: 1656 - DNA, 28 bp, homo sapiens
  ID01011.5p-miR|-1|3
ggccaaggatgagaactctaatctgatt

SEQ ID NO: 1657 - DNA, 26 bp, homo sapiens
  ID01011.5p-miR|-2|0
tggccaaggatgagaactctaatctg

SEQ ID NO: 1658 - DNA, 21 bp, homo sapiens
  ID01011.5p-miR|-2|-5
tggccaaggatgagaactcta

SEQ ID NO: 1659 - DNA, 20 bp, homo sapiens
  ID01031.5p-miR|0|0
tgctgtagtaggttgtgggg

SEQ ID NO: 1660 - DNA, 22 bp, homo sapiens
  ID01047.3p-miR|0|0
ttgggtagggctgagattctgc

SEQ ID NO: 1661 - DNA, 22 bp, homo sapiens
  ID01180.5p-miR|0|1
gagttaaagactttttctctga

SEQ ID NO: 1662 - DNA, 23 bp, homo sapiens
  ID01180.5p-miR|-1|1
gagttaaagactttttctctgat

SEQ ID NO: 1663 - DNA, 25 bp, homo sapiens
  ID01180.5p-miR|-3|1
gagttaaagactttttctctgattt

SEQ ID NO: 1664 - DNA, 26 bp, homo sapiens
  ID01180.5p-miR|-4|1
gagttaaagactttttctctgatttg

SEQ ID NO: 1665 - DNA, 23 bp, homo sapiens
  ID01200.3p-miR|0|0
atgacagattgacatggacaatt

SEQ ID NO: 1666 - DNA, 22 bp, homo sapiens
  ID01200.3p-miR|0|-1
tgacagattgacatggacaatt

SEQ ID NO: 1667 - DNA, 24 bp, homo sapiens
  ID01200.3p-miR|-1|0
atgacagattgacatggacaattc

SEQ ID NO: 1668 - DNA, 22 bp, homo sapiens
  ID01200.3p-miR|1|0
atgacagattgacatggacaat

SEQ ID NO: 1669 - DNA, 25 bp, homo sapiens
  ID01200.3p-miR|-2|0
atgacagattgacatggacaattct

SEQ ID NO: 1670 - DNA, 26 bp, homo sapiens
  ID01200.3p-miR|-3|0
atgacagattgacatggacaattctg

SEQ ID NO: 1671 - DNA, 28 bp, homo sapiens
  ID01200.3p-miR|-5|0
atgacagattgacatggacaattctggg

SEQ ID NO: 1672 - DNA, 21 bp, homo sapiens
  ID00082.5p-miR|0|0
ctggaggactaagaaggctga

SEQ ID NO: 1673 - DNA, 22 bp, homo sapiens
  ID00082.5p-miR|0|1
actggaggactaagaaggctga

SEQ ID NO: 1674 - DNA, 20 bp, homo sapiens
  ID00082.5p-miR|0|-1
tggaggactaagaaggctga

SEQ ID NO: 1675 - DNA, 23 bp, homo sapiens
  ID00082.5p-miR|0|2
aactggaggactaagaaggctga

SEQ ID NO: 1676 - DNA, 24 bp, homo sapiens
  ID00082.5p-miR|0|3
caactggaggactaagaaggctga

SEQ ID NO: 1677 - DNA, 25 bp, homo sapiens
  ID00082.5p-miR|0|4
acaactggaggactaagaaggctga

SEQ ID NO: 1678 - DNA, 21 bp, homo sapiens
  tDNAMT_HisGTG_MT_+_12138_12206@18.38.21
aaaacatcagattgtgaatct

SEQ ID NO: 1679 - DNA, 24 bp, homo sapiens
  tDNAMT_HisGTG_MT_+_12138_12206@18.41.24
aaaacatcagattgtgaatctgac

SEQ ID NO: 1680 - DNA, 25 bp, homo sapiens
  tDNAMT_HisGTG_MT_+_12138_12206@18.42.25
aaaacatcagattgtgaatctgaca

SEQ ID NO: 1681 - DNA, 28 bp, homo sapiens
  tDNAMT_HisGTG_MT_+_12138_12206@18.45.28
aaaacatcagattgtgaatctgacaaca

SEQ ID NO: 1682 - DNA, 29 bp, homo sapiens
  tDNAMT_HisGTG_MT_+_12138_12206@18.46.29
aaaacatcagattgtgaatctgacaacag

SEQ ID NO: 1683 - DNA, 23 bp, homo sapiens
  tDNAMT_ThrTGT_MT_+_15888_15953@47.69.23
aaaacctttttccaaggacacca

SEQ ID NO: 1684 - DNA, 28 bp, homo sapiens
  tDNAMT_TyrGTA_MT_-_5826_5891@4.31.28
aaaatggctgagtgaagcattggactgt

SEQ ID NO: 1685 - DNA, 29 bp, homo sapiens
  tDNAMT_TyrGTA_MT_-_5826_5891@4.32.29
aaaatggctgagtgaagcattggactgta

SEQ ID NO: 1686 - DNA, 17 bp, homo sapiens
  tDNAMT_PheGAA_MT_+_577_647@36.52.17
aaaatgtttagacgggc

SEQ ID NO: 1687 - DNA, 19 bp, homo sapiens
  tDNAMT_PheGAA_MT_+_577_647@36.54.19
aaaatgtttagacgggctc

SEQ ID NO: 1688 - DNA, 20 bp, homo sapiens
  tDNAMT_PheGAA_MT_+_577_647@36.55.20
aaaatgtttagacgggctca

SEQ ID NO: 1689 - DNA, 21 bp, homo sapiens
  tDNAMT_PheGAA_MT_+_577_647@36.56.21
aaaatgtttagacgggctcac

SEQ ID NO: 1690 - DNA, 22 bp, homo sapiens
  tDNAMT_PheGAA_MT_+_577_647@36.57.22
aaaatgtttagacgggctcaca

SEQ ID NO: 1691 - DNA, 19 bp, homo sapiens
  tDNAMT_HisGTG_MT_+_12138_12206@19.37.19
aaacatcagattgtgaatc

SEQ ID NO: 1692 - DNA, 22 bp, homo sapiens
  tDNAMT_HisGTG_MT_+_12138_12206@19.40.22
aaacatcagattgtgaatctga

SEQ ID NO: 1693 - DNA, 23 bp, homo sapiens
  tDNAMT_HisGTG_MT_+_12138_12206@19.41.23
aaacatcagattgtgaatctgac

SEQ ID NO: 1694 - DNA, 24 bp, homo sapiens
  tDNAMT_HisGTG_MT_+_12138_12206@19.42.24
aaacatcagattgtgaatctgaca

SEQ ID NO: 1695 - DNA, 27 bp, homo sapiens
  tDNAMT_HisGTG_MT_+_12138_12206@19.45.27
aaacatcagattgtgaatctgacaaca

SEQ ID NO: 1696 - DNA, 28 bp, homo sapiens
  tDNAMT_HisGTG_MT_+_12138_12206@19.46.28
aaacatcagattgtgaatctgacaacag

SEQ ID NO: 1697 - DNA, 29 bp, homo sapiens
  tDNAMT_HisGTG_MT_+_12138_12206@19.47.29
aaacatcagattgtgaatctgacaacaga

SEQ ID NO: 1698 - DNA, 30 bp, homo sapiens
  tDNAMT_HisGTG_MT_+_12138_12206@19.48.30
aaacatcagattgtgaatctgacaacagag

SEQ ID NO: 1699 - DNA, 19 bp, homo sapiens
  tDNA1_MetCAT_9_+_19403996_19404070@60.78.19,tDNA6
aaaccatcctctgctacca

SEQ ID NO: 1700 - DNA, 20 bp, homo sapiens
  tDNAMT_IleGAT_MT_+_4263_4331@53.72.20
aaacccccttatttctacca

SEQ ID NO: 1701 - DNA, 19 bp, homo sapiens
  tDNAMT_CysGCA_MT_-_5761_5826@51.69.19
aaacctgccggggcttcca

SEQ ID NO: 1702 - DNA, 22 bp, homo sapiens
  tDNAMT_ThrTGT_MT_+_15888_15953@48.69.22
aaacctttttccaaggacacca

SEQ ID NO: 1703 - DNA, 17 bp, homo sapiens
  tDNAMT_ProTGG_MT_-_15956_16023@52.68.17
aaagactttttctctga

SEQ ID NO: 1704 - DNA, 18 bp, homo sapiens
  tDNAMT_ProTGG_MT_-_15956_16023@52.69.18
aaagactttttctctgac

SEQ ID NO: 1705 - DNA, 19 bp, homo sapiens
  tDNAMT_ProTGG_MT_-_15956_16023@52.70.19
aaagactttttctctgacc

SEQ ID NO: 1706 - DNA, 20 bp, homo sapiens
  tDNAMT_ProTGG_MT_-_15956_16023@52.71.20
aaagactttttctctgacca

SEQ ID NO: 1707 - DNA, 22 bp, homo sapiens
  tDNAMT_LysTTT_MT_+_8295_8364@37.58.22,tDNAlookali
aaagattaagagaaccaacacc

SEQ ID NO: 1708 - DNA, 29 bp, homo sapiens
  tDNAMT_LysTTT_MT_+_8295_8364@37.65.29,tDNAlookali
aaagattaagagaaccaacacctctttac

SEQ ID NO: 1709 - DNA, 20 bp, homo sapiens
  tDNA1_TrpCCA_7_+_99067307_99067378@56.75.20,tDNA6
aaatcacgtcggggtcacca

SEQ ID NO: 1710 - DNA, 20 bp, homo sapiens
  tDNA65_ProAGG_1_-_167684725_167684796@56.75.20,tr
aaatcccggacgagccccca

SEQ ID NO: 1711 - DNA, 20 bp, homo sapiens
  tDNAMT_AspGTC_MT_+_7518_7585@52.71.20
aaatcctatatatcttacca

SEQ ID NO: 1712 - DNA, 20 bp, homo sapiens
  tDNA42_GlnCTG_6_+_27263212_27263283@56.75.20,tDNA
aaatctcggtggaacctcca

SEQ ID NO: 1713 - DNA, 20 bp, homo sapiens
  tDNA130_GlnTTG_6_-_27763640_27763711@56.75.20,trn
aaatctcggtgggacctcca

SEQ ID NO: 1714 - DNA, 27 bp, homo sapiens
  tDNAMT_TyrGTA_MT_-_5826_5891@5.31.27
aaatggctgagtgaagcattggactgt

SEQ ID NO: 1715 - DNA, 28 bp, homo sapiens
  tDNAMT_TyrGTA_MT_-_5826_5891@5.32.28
aaatggctgagtgaagcattggactgta

SEQ ID NO: 1716 - DNA, 29 bp, homo sapiens
  tDNAMT_TyrGTA_MT_-_5826_5891@5.33.29
aaatggctgagtgaagcattggactgtaa

SEQ ID NO: 1717 - DNA, 19 bp, homo sapiens
  tDNAMT_PheGAA_MT_+_577_647@37.55.19
aaatgtttagacgggctca

SEQ ID NO: 1718 - DNA, 20 bp, homo sapiens
  tDNAMT_PheGAA_MT_+_577_647@37.56.20
aaatgtttagacgggctcac

SEQ ID NO: 1719 - DNA, 21 bp, homo sapiens
  tDNAMT_PheGAA_MT_+_577_647@37.57.21
aaatgtttagacgggctcaca

SEQ ID NO: 1720 - DNA, 20 bp, homo sapiens
  tDNAMT_SerGCT_MT_+_12207_12265@42.61.20
aacaacatggctttctcacc

SEQ ID NO: 1721 - DNA, 21 bp, homo sapiens
  tDNAMT_SerGCT_MT_+_12207_12265@42.62.21
aacaacatggctttctcacca

SEQ ID NO: 1722 - DNA, 20 bp, homo sapiens
  tDNAMT_LysTTT_MT_+_8295_8364@53.72.20,tDNAlookali
aacacctctttacagtgacc

SEQ ID NO: 1723 - DNA, 21 bp, homo sapiens
  tDNAMT_LysTTT_MT_+_8295_8364@53.73.21,tDNAlookali
aacacctctttacagtgacca

SEQ ID NO: 1724 - DNA, 19 bp, homo sapiens
  tDNAMT_LeuTAG_MT_+_12266_12336@14.32.19
aacagctatccattggtct

SEQ ID NO: 1725 - DNA, 22 bp, homo sapiens
  tDNAMT_LeuTAG_MT_+_12266_12336@14.35.22
aacagctatccattggtcttag

SEQ ID NO: 1726 - DNA, 23 bp, homo sapiens
  tDNAMT_LeuTAG_MT_+_12266_12336@14.36.23
aacagctatccattggtcttagg

SEQ ID NO: 1727 - DNA, 24 bp, homo sapiens
  tDNAMT_LeuTAG_MT_+_12266_12336@14.37.24
aacagctatccattggtcttaggc

SEQ ID NO: 1728 - DNA, 25 bp, homo sapiens
  tDNAMT_LeuTAG_MT_+_12266_12336@14.38.25
aacagctatccattggtcttaggcc

SEQ ID NO: 1729 - DNA, 18 bp, homo sapiens
  tDNAMT_HisGTG_MT_+_12138_12206@20.37.18
aacatcagattgtgaatc

SEQ ID NO: 1730 - DNA, 21 bp, homo sapiens
  tDNAMT_HisGTG_MT_+_12138_12206@20.40.21
aacatcagattgtgaatctga

SEQ ID NO: 1731 - DNA, 22 bp, homo sapiens
  tDNAMT_HisGTG_MT_+_12138_12206@20.41.22
aacatcagattgtgaatctgac

SEQ ID NO: 1732 - DNA, 23 bp, homo sapiens
  tDNAMT_HisGTG_MT_+_12138_12206@20.42.23
aacatcagattgtgaatctgaca

SEQ ID NO: 1733 - DNA, 26 bp, homo sapiens
  tDNAMT_HisGTG_MT_+_12138_12206@20.45.26
aacatcagattgtgaatctgacaaca

SEQ ID NO: 1734 - DNA, 27 bp, homo sapiens
  tDNAMT_HisGTG_MT_+_12138_12206@20.46.27
aacatcagattgtgaatctgacaacag

SEQ ID NO: 1735 - DNA, 28 bp, homo sapiens
  tDNAMT_HisGTG_MT_+_12138_12206@20.47.28
aacatcagattgtgaatctgacaacaga

SEQ ID NO: 1736 - DNA, 29 bp, homo sapiens
  tDNAMT_HisGTG_MT_+_12138_12206@20.48.29
aacatcagattgtgaatctgacaacagag

SEQ ID NO: 1737 - DNA, 30 bp, homo sapiens
  tDNAMT_HisGTG_MT_+_12138_12206@20.49.30
aacatcagattgtgaatctgacaacagagg

SEQ ID NO: 1738 - DNA, 18 bp, homo sapiens
  tDNAMT_SerGCT_MT_+_12207_12265@45.62.18
aacatggctttctcacca

SEQ ID NO: 1739 - DNA, 21 bp, homo sapiens
  tDNAMT_GlyTCC_MT_+_9991_10058@51.71.21
aacattcaaaaaagagtacca

SEQ ID NO: 1740 - DNA, 21 bp, homo sapiens
  tDNAMT_HisGTG_MT_+_12138_12206@14.34.21
aaccaaaacatcagattgtga

SEQ ID NO: 1741 - DNA, 29 bp, homo sapiens
  tDNAMT_HisGTG_MT_+_12138_12206@14.42.29
aaccaaaacatcagattgtgaatctgaca

SEQ ID NO: 1742 - DNA, 24 bp, homo sapiens
  tDNAMT_LysTTT_MT_+_8295_8364@49.72.24,tDNAlookali
aaccaacacctctttacagtgacc

SEQ ID NO: 1743 - DNA, 25 bp, homo sapiens
  tDNAMT_LysTTT_MT_+_8295_8364@49.73.25,tDNAlookali
aaccaacacctctttacagtgacca

SEQ ID NO: 1744 - DNA, 18 bp, homo sapiens
  tDNA1_MetCAT_9_+_19403996_19404070@61.78.18,tDNA6
aaccatcctctgctacca

SEQ ID NO: 1745 - DNA, 22 bp, homo sapiens
  tDNA151_ThrCGT_6_-_27271568_27271639@36.57.22
aacccagaggtcaatggatcga

SEQ ID NO: 1746 - DNA, 21 bp, homo sapiens
  tDNA32_MetCAT_1_+_153643726_153643797@36.56.21,tr
aacccagaggtcgatggatcg

SEQ ID NO: 1747 - DNA, 22 bp, homo sapiens
  tDNA32_MetCAT_1_+_153643726_153643797@36.57.22,tr
aacccagaggtcgatggatcga

SEQ ID NO: 1748 - DNA, 19 bp, homo sapiens
  tDNAMT_IleGAT_MT_+_4263_4331@54.72.19
aacccccttatttctacca

SEQ ID NO: 1749 - DNA, 18 bp, homo sapiens
  tDNA136_ValAAC_6_-_27648885_27648957@59.76.18,trn
aaccgggcggaaacacca

SEQ ID NO: 1750 - DNA, 18 bp, homo sapiens
  tDNAMT_CysGCA_MT_-_5761_5826@52.69.18
aacctgccggggcttcca

SEQ ID NO: 1751 - DNA, 19 bp, homo sapiens
  tDNAMT_LeuTAG_MT_+_12266_12336@55.73.19
aactccaaataaaagtacc

SEQ ID NO: 1752 - DNA, 20 bp, homo sapiens
  tDNAMT_LeuTAG_MT_+_12266_12336@55.74.20
aactccaaataaaagtacca

SEQ ID NO: 1753 - DNA, 20 bp, homo sapiens
  tDNAMT_SerGCT_MT_+_12207_12265@16.35.20
aactgctaactcatgccccc

SEQ ID NO: 1754 - DNA, 18 bp, homo sapiens
  tDNAMT_ValTAC_MT_+_1602_1670@49.66.18
aacttaacttgaccgctc

SEQ ID NO: 1755 - DNA, 19 bp, homo sapiens
  tDNAMT_ValTAC_MT_+_1602_1670@49.67.19
aacttaacttgaccgctct

SEQ ID NO: 1756 - DNA, 20 bp, homo sapiens
  tDNAMT_ValTAC_MT_+_1602_1670@49.68.20
aacttaacttgaccgctctg

SEQ ID NO: 1757 - DNA, 21 bp, homo sapiens
  tDNAMT_ValTAC_MT_+_1602_1670@49.69.21
aacttaacttgaccgctctga

SEQ ID NO: 1758 - DNA, 22 bp, homo sapiens
  tDNAMT_ValTAC_MT_+_1602_1670@49.70.22
aacttaacttgaccgctctgac

SEQ ID NO: 1759 - DNA, 23 bp, homo sapiens
  tDNAMT_ValTAC_MT_+_1602_1670@49.71.23
aacttaacttgaccgctctgacc

SEQ ID NO: 1760 - DNA, 24 bp, homo sapiens
  tDNAMT_ValTAC_MT_+_1602_1670@49.72.24
aacttaacttgaccgctctgacca

SEQ ID NO: 1761 - DNA, 25 bp, homo sapiens
  tDNAMT_GlyTCC_MT_+_9991_10058@27.51.25
aacttccaattaactagttttgaca

SEQ ID NO: 1762 - DNA, 27 bp, homo sapiens
  tDNAMT_GlyTCC_MT_+_9991_10058@27.53.27
aacttccaattaactagttttgacaac

SEQ ID NO: 1763 - DNA, 28 bp, homo sapiens
  tDNAMT_GlyTCC_MT_+_9991_10058@27.54.28
aacttccaattaactagttttgacaaca

SEQ ID NO: 1764 - DNA, 16 bp, homo sapiens
  tDNAMT_ValTAC_MT_+_1602_1670@54.69.16
aacttgaccgctctga

SEQ ID NO: 1765 - DNA, 17 bp, homo sapiens
  tDNAMT_ValTAC_MT_+_1602_1670@54.70.17
aacttgaccgctctgac

SEQ ID NO: 1766 - DNA, 18 bp, homo sapiens
  tDNAMT_ValTAC_MT_+_1602_1670@54.71.18
aacttgaccgctctgacc

SEQ ID NO: 1767 - DNA, 19 bp, homo sapiens
  tDNAMT_ValTAC_MT_+_1602_1670@54.72.19
aacttgaccgctctgacca

SEQ ID NO: 1768 - DNA, 16 bp, homo sapiens
  tDNAMT_SerGCT_MT_+_12207_12265@13.28.16
aagaactgctaactca

SEQ ID NO: 1769 - DNA, 18 bp, homo sapiens
  tDNAMT_SerGCT_MT_+_12207_12265@13.30.18
aagaactgctaactcatg

SEQ ID NO: 1770 - DNA, 19 bp, homo sapiens
  tDNAMT_SerGCT_MT_+_12207_12265@13.31.19
aagaactgctaactcatgc

SEQ ID NO: 1771 - DNA, 20 bp, homo sapiens
  tDNAMT_SerGCT_MT_+_12207_12265@13.32.20
aagaactgctaactcatgcc

SEQ ID NO: 1772 - DNA, 21 bp, homo sapiens
  tDNAMT_SerGCT_MT_+_12207_12265@13.33.21
aagaactgctaactcatgccc

SEQ ID NO: 1773 - DNA, 22 bp, homo sapiens
  tDNAMT_SerGCT_MT_+_12207_12265@13.34.22
aagaactgctaactcatgcccc

SEQ ID NO: 1774 - DNA, 23 bp, homo sapiens
  tDNAMT_SerGCT_MT_+_12207_12265@13.35.23
aagaactgctaactcatgccccc

SEQ ID NO: 1775 - DNA, 24 bp, homo sapiens
  tDNAMT_SerGCT_MT_+_12207_12265@13.36.24
aagaactgctaactcatgccccca

SEQ ID NO: 1776 - DNA, 26 bp, homo sapiens
  tDNAMT_SerGCT_MT_+_12207_12265@13.38.26
aagaactgctaactcatgcccccatg

SEQ ID NO: 1777 - DNA, 16 bp, homo sapiens
  tDNAMT_ProTGG_MT_-_15956_16023@53.68.16
aagactttttctctga

SEQ ID NO: 1778 - DNA, 17 bp, homo sapiens
  tDNAMT_ProTGG_MT_-_15956_16023@53.69.17
aagactttttctctgac

SEQ ID NO: 1779 - DNA, 18 bp, homo sapiens
  tDNAMT_ProTGG_MT_-_15956_16023@53.70.18
aagactttttctctgacc

SEQ ID NO: 1780 - DNA, 19 bp, homo sapiens
  tDNAMT_ProTGG_MT_-_15956_16023@53.71.19
aagactttttctctgacca

SEQ ID NO: 1781 - DNA, 29 bp, homo sapiens
  tDNAMT_LysTTT_MT_+_8295_8364@44.72.29,tDNAlookali
aagagaaccaacacctctttacagtgacc

SEQ ID NO: 1782 - DNA, 17 bp, homo sapiens
  tDNAMT_LysTTT_MT_+_8295_8364@38.54.17,tDNAlookali
aagattaagagaaccaa

SEQ ID NO: 1783 - DNA, 19 bp, homo sapiens
  tDNAMT_LysTTT_MT_+_8295_8364@38.56.19,tDNAlookali
aagattaagagaaccaaca

SEQ ID NO: 1784 - DNA, 20 bp, homo sapiens
  tDNAMT_LysTTT_MT_+_8295_8364@38.57.20,tDNAlookali
aagattaagagaaccaacac

SEQ ID NO: 1785 - DNA, 21 bp, homo sapiens
  tDNAMT_LysTTT_MT_+_8295_8364@38.58.21,tDNAlookali
aagattaagagaaccaacacc

SEQ ID NO: 1786 - DNA, 22 bp, homo sapiens
  tDNAMT_LysTTT_MT_+_8295_8364@38.59.22,tDNAlookali
aagattaagagaaccaacacct

SEQ ID NO: 1787 - DNA, 30 bp, homo sapiens
  tDNAMT_LysTTT_MT_+_8295_8364@38.67.30,tDNAlookali
aagattaagagaaccaacacctctttacag

SEQ ID NO: 1788 - DNA, 23 bp, homo sapiens
  tDNA34_GlyCCC_16_-_686736_686806@27.49.23,tDNA27_
aagattcccattcttgcgacccg

SEQ ID NO: 1789 - DNA, 16 bp, homo sapiens
  tDNAMT_TyrGTA_MT_-_5826_5891@18.33.16
aagcattggactgtaa

SEQ ID NO: 1790 - DNA, 19 bp, homo sapiens
  tDNAMT_TyrGTA_MT_-_5826_5891@18.36.19
aagcattggactgtaaatc

SEQ ID NO: 1791 - DNA, 20 bp, homo sapiens
  tDNAMT_TyrGTA_MT_-_5826_5891@18.37.20
aagcattggactgtaaatct

SEQ ID NO: 1792 - DNA, 21 bp, homo sapiens
  tDNAMT_TyrGTA_MT_-_5826_5891@18.38.21
aagcattggactgtaaatcta

SEQ ID NO: 1793 - DNA, 21 bp, homo sapiens
  tDNAMT_SerGCT_MT_+_12207_12265@5.25.21
aagctcacaagaactgctaac

SEQ ID NO: 1794 - DNA, 30 bp, homo sapiens
  tDNA16_ValTAC_11_-_59318460_59318532@43.72.30,trn
aaggtcctgggttcgagccccagtggaacc

SEQ ID NO: 1795 - DNA, 20 bp, homo sapiens
  tDNA12_TrpCCA_17_+_19411494_19411565@56.75.20
aagtcacgtcggggtcacca

SEQ ID NO: 1796 - DNA, 20 bp, homo sapiens
  tDNAMT_AsnGTT_MT_-_5657_5729@57.76.20,tDNAlookali
aagtcccattggtctagcca

SEQ ID NO: 1797 - DNA, 18 bp, homo sapiens
  tDNAMT_TrpTCA_MT_+_5512_5579@54.71.18,tDNAlookali
aatacttaatttctgcca

SEQ ID NO: 1798 - DNA, 19 bp, homo sapiens
  tDNA1_TrpCCA_7_+_99067307_99067378@57.75.19,tDNA6
aatcacgtcggggtcacca

SEQ ID NO: 1799 - DNA, 18 bp, homo sapiens
  tDNAMT_ArgTCG_MT_+_10405_10469@51.68.18
aatcatatttaccaacca

SEQ ID NO: 1800 - DNA, 21 bp, homo sapiens
  tDNA84_GlnTTG_6_+_145503859_145503930@37.57.21,tr
aatccagcaatccgagttcga

SEQ ID NO: 1801 - DNA, 19 bp, homo sapiens
  tDNA131_GlnCTG_6_-_27759135_27759206@37.55.19,trn
aatccagcgatccgagttc

SEQ ID NO: 1802 - DNA, 20 bp, homo sapiens
  tDNA131_GlnCTG_6_-_27759135_27759206@37.56.20,trn
aatccagcgatccgagttca

SEQ ID NO: 1803 - DNA, 21 bp, homo sapiens
  tDNA131_GlnCTG_6_-_27759135_27759206@37.57.21,trn
aatccagcgatccgagttcaa

SEQ ID NO: 1804 - DNA, 22 bp, homo sapiens
  tDNA131_GlnCTG_6_-_27759135_27759206@37.58.22,trn
aatccagcgatccgagttcaaa

SEQ ID NO: 1805 - DNA, 23 bp, homo sapiens
  tDNA131_GlnCTG_6_-_27759135_27759206@37.59.23,trn
aatccagcgatccgagttcaaat

SEQ ID NO: 1806 - DNA, 24 bp, homo sapiens
  tDNA131_GlnCTG_6_-_27759135_27759206@37.60.24,trn
aatccagcgatccgagttcaaatc

SEQ ID NO: 1807 - DNA, 22 bp, homo sapiens
  tDNA146_GlnCTG_6_-_27515531_27515602@37.58.22
aatccagcgatccgagttcaag

SEQ ID NO: 1808 - DNA, 23 bp, homo sapiens
  tDNA146_GlnCTG_6_-_27515531_27515602@37.59.23
aatccagcgatccgagttcaagt

SEQ ID NO: 1809 - DNA, 22 bp, homo sapiens
  tDNA112_GlnCTG_1_-_147737382_147737453@37.58.22,t
aatccagcgatccgagttcgag

SEQ ID NO: 1810 - DNA, 23 bp, homo sapiens
  tDNA112_GlnCTG_1_-_147737382_147737453@37.59.23,t
aatccagcgatccgagttcgagt

SEQ ID NO: 1811 - DNA, 19 bp, homo sapiens
  tDNA4_ArgTCT_17_+_8024243_8024330@58.76.19
aatcccaccagagtcgcca

SEQ ID NO: 1812 - DNA, 18 bp, homo sapiens
  tDNA31_SerGCT_6_+_27065085_27065166@67.84.18
aatcccaccctcgtcgcc

SEQ ID NO: 1813 - DNA, 19 bp, homo sapiens
  tDNA31_SerGCT_6_+_27065085_27065166@67.85.19
aatcccaccctcgtcgcca

SEQ ID NO: 1814 - DNA, 18 bp, homo sapiens
  tDNA126_LeuAAG_6_-_28446400_28446481@67.84.18,trn
aatcccaccgctgccacc

SEQ ID NO: 1815 - DNA, 19 bp, homo sapiens
  tDNA126_LeuAAG_6_-_28446400_28446481@67.85.19,trn
aatcccaccgctgccacca

SEQ ID NO: 1816 - DNA, 19 bp, homo sapiens
  tDNA43_SerGCT_6_+_27265775_27265856@67.85.19
aatcccaccttcgtcgcca

SEQ ID NO: 1817 - DNA, 18 bp, homo sapiens
  tDNA34_LeuCAG_1_+_161411323_161411405@68.85.18,tr
aatcccactcctgacacc

SEQ ID NO: 1818 - DNA, 19 bp, homo sapiens
  tDNA34_LeuCAG_1_+_161411323_161411405@68.86.19,tr
aatcccactcctgacacca

SEQ ID NO: 1819 - DNA, 19 bp, homo sapiens
  tDNA17_LeuCAG_16_+_57333863_57333945@68.86.19,trn
aatcccacttctgacacca

SEQ ID NO: 1820 - DNA, 19 bp, homo sapiens
  tDNA40_ThrAGT_17_-_8042770_8042843@59.77.19,tDNA3
aatcccagcggtgcctcca

SEQ ID NO: 1821 - DNA, 19 bp, homo sapiens
  tDNA127_ThrTGT_6_-_28442329_28442402@59.77.19
aatcccagtagagcctcca

SEQ ID NO: 1822 - DNA, 18 bp, homo sapiens
  tDNA175_SerGCT_6_-_26305718_26305801@69.86.18,trn
aatcccatcctcgtcgcc

SEQ ID NO: 1823 - DNA, 19 bp, homo sapiens
  tDNA175_SerGCT_6_-_26305718_26305801@69.87.19,trn
aatcccatcctcgtcgcca

SEQ ID NO: 1824 - DNA, 20 bp, homo sapiens
  tDNA65_AlaAGC_6_+_28574933_28575004@56.75.20,tDNA
aatccccggcacctccacca

SEQ ID NO: 1825 - DNA, 19 bp, homo sapiens
  tDNA65_ProAGG_1_-_167684725_167684796@57.75.19,tr
aatcccggacgagccccca

SEQ ID NO: 1826 - DNA, 19 bp, homo sapiens
  tDNA14_TyrGTA_6_+_26569086_26569176@58.76.19,tDNA
aatccggctcgaaggacca

SEQ ID NO: 1827 - DNA, 19 bp, homo sapiens
  tDNA16_TyrGTA_6_+_26577332_26577420@58.76.19,tDNA
aatccggctcggaggacca

SEQ ID NO: 1828 - DNA, 19 bp, homo sapiens
  tDNA29_CysGCA_17_-_37017937_37018008@57.75.19,trn
aatccgggtgccccctcca

SEQ ID NO: 1829 - DNA, 19 bp, homo sapiens
  tDNAMT_AspGTC_MT_+_7518_7585@53.71.19
aatcctatatatcttacca

SEQ ID NO: 1830 - DNA, 19 bp, homo sapiens
  tDNA145_SerAGA_6_-_27521192_27521273@67.85.19,trn
aatcctgccgactacgcca

SEQ ID NO: 1831 - DNA, 19 bp, homo sapiens
  tDNA42_GlnCTG_6_+_27263212_27263283@57.75.19,tDNA
aatctcggtggaacctcca

SEQ ID NO: 1832 - DNA, 19 bp, homo sapiens
  tDNA130_GlnTTG_6_-_27763640_27763711@57.75.19,trn
aatctcggtgggacctcca

SEQ ID NO: 1833 - DNA, 19 bp, homo sapiens
  tDNA29_IleTAT_6_+_26988125_26988218@38.56.19,tDNA
aatgccgaggttgtgagtt

SEQ ID NO: 1834 - DNA, 25 bp, homo sapiens
  tDNAMT_TyrGTA_MT_-_5826_5891@6.30.25
aatggctgagtgaagcattggactg

SEQ ID NO: 1835 - DNA, 26 bp, homo sapiens
  tDNAMT_TyrGTA_MT_-_5826_5891@6.31.26
aatggctgagtgaagcattggactgt

SEQ ID NO: 1836 - DNA, 27 bp, homo sapiens
  tDNAMT_TyrGTA_MT_-_5826_5891@6.32.27
aatggctgagtgaagcattggactgta

SEQ ID NO: 1837 - DNA, 28 bp, homo sapiens
  tDNAMT_TyrGTA_MT_-_5826_5891@6.33.28
aatggctgagtgaagcattggactgtaa

SEQ ID NO: 1838 - DNA, 21 bp, homo sapiens
  tDNA22_GlnCTG_1_+_147800937_147801008@14.34.21,tr
aatggtaagcactctggactc

SEQ ID NO: 1839 - DNA, 17 bp, homo sapiens
  tDNA15_GlnCTG_1_+_145963304_145963375@14.30.17,tr
aatggtgagcactctgg

SEQ ID NO: 1840 - DNA, 18 bp, homo sapiens
  tDNA15_GlnCTG_1_+_145963304_145963375@14.31.18,tr
aatggtgagcactctgga

SEQ ID NO: 1841 - DNA, 20 bp, homo sapiens
  tDNA15_GlnCTG_1_+_145963304_145963375@14.33.20,tr
aatggtgagcactctggact

SEQ ID NO: 1842 - DNA, 21 bp, homo sapiens
  tDNA15_GlnCTG_1_+_145963304_145963375@14.34.21,tr
aatggtgagcactctggactc

SEQ ID NO: 1843 - DNA, 18 bp, homo sapiens
  tDNAMT_ProTGG_MT_-_15956_16023@40.57.18
aatggtggagttaaagac

SEQ ID NO: 1844 - DNA, 19 bp, homo sapiens
  tDNAMT_ProTGG_MT_-_15956_16023@40.58.19
aatggtggagttaaagact

SEQ ID NO: 1845 - DNA, 30 bp, homo sapiens
  tDNAMT_ProTGG_MT_-_15956_16023@40.69.30
aatggtggagttaaagactttttctctgac

SEQ ID NO: 1846 - DNA, 16 bp, homo sapiens
  tDNA42_GlnCTG_6_+_27263212_27263283@14.29.16,tDNA
aatggttagcactctg

SEQ ID NO: 1847 - DNA, 17 bp, homo sapiens
  tDNA42_GlnCTG_6_+_27263212_27263283@14.30.17,tDNA
aatggttagcactctgg

SEQ ID NO: 1848 - DNA, 18 bp, homo sapiens
  tDNA42_GlnCTG_6_+_27263212_27263283@14.31.18,tDNA
aatggttagcactctgga

SEQ ID NO: 1849 - DNA, 19 bp, homo sapiens
  tDNA42_GlnCTG_6_+_27263212_27263283@14.32.19,tDNA
aatggttagcactctggac

SEQ ID NO: 1850 - DNA, 20 bp, homo sapiens
  tDNA42_GlnCTG_6_+_27263212_27263283@14.33.20,tDNA
aatggttagcactctggact

SEQ ID NO: 1851 - DNA, 21 bp, homo sapiens
  tDNA42_GlnCTG_6_+_27263212_27263283@14.34.21,tDNA
aatggttagcactctggactc

SEQ ID NO: 1852 - DNA, 22 bp, homo sapiens
  tDNA42_GlnCTG_6_+_27263212_27263283@14.35.22,tDNA
aatggttagcactctggactct

SEQ ID NO: 1853 - DNA, 23 bp, homo sapiens
  tDNA42_GlnCTG_6_+_27263212_27263283@14.36.23,tDNA
aatggttagcactctggactctg

SEQ ID NO: 1854 - DNA, 24 bp, homo sapiens
  tDNA42_GlnCTG_6_+_27263212_27263283@14.37.24,tDNA
aatggttagcactctggactctga

SEQ ID NO: 1855 - DNA, 25 bp, homo sapiens
  tDNA42_GlnCTG_6_+_27263212_27263283@14.38.25,tDNA
aatggttagcactctggactctgaa

SEQ ID NO: 1856 - DNA, 26 bp, homo sapiens
  tDNA42_GlnCTG_6_+_27263212_27263283@14.39.26,tDNA
aatggttagcactctggactctgaat

SEQ ID NO: 1857 - DNA, 27 bp, homo sapiens
  tDNA42_GlnCTG_6_+_27263212_27263283@14.40.27,tDNA
aatggttagcactctggactctgaatc

SEQ ID NO: 1858 - DNA, 30 bp, homo sapiens
  tDNA146_GlnCTG_6_-_27515531_27515602@14.43.30,trn
aatggttagcactctggactctgaatccag

SEQ ID NO: 1859 - DNA, 21 bp, homo sapiens
  tDNA130_GlnTTG_6_-_27763640_27763711@14.34.21,trn
aatggttagcactctggactt

SEQ ID NO: 1860 - DNA, 23 bp, homo sapiens
  tDNA130_GlnTTG_6_-_27763640_27763711@14.36.23,trn
aatggttagcactctggactttg

SEQ ID NO: 1861 - DNA, 24 bp, homo sapiens
  tDNA130_GlnTTG_6_-_27763640_27763711@14.37.24,trn
aatggttagcactctggactttga

SEQ ID NO: 1862 - DNA, 27 bp, homo sapiens
  tDNA130_GlnTTG_6_-_27763640_27763711@14.40.27,trn
aatggttagcactctggactttgaatc

SEQ ID NO: 1863 - DNA, 17 bp, homo sapiens
  tDNAMT_PheGAA_MT_+_577_647@38.54.17
aatgtttagacgggctc

SEQ ID NO: 1864 - DNA, 18 bp, homo sapiens
  tDNAMT_PheGAA_MT_+_577_647@38.55.18
aatgtttagacgggctca

SEQ ID NO: 1865 - DNA, 19 bp, homo sapiens
  tDNAMT_PheGAA_MT_+_577_647@38.56.19
aatgtttagacgggctcac

SEQ ID NO: 1866 - DNA, 20 bp, homo sapiens
  tDNAMT_PheGAA_MT_+_577_647@38.57.20
aatgtttagacgggctcaca

SEQ ID NO: 1867 - DNA, 18 bp, homo sapiens
  tDNAMT_GlyTCC_MT_+_9991_10058@34.51.18
aattaactagttttgaca

SEQ ID NO: 1868 - DNA, 20 bp, homo sapiens
  tDNAMT_GlyTCC_MT_+_9991_10058@34.53.20
aattaactagttttgacaac

SEQ ID NO: 1869 - DNA, 21 bp, homo sapiens
  tDNAMT_GlyTCC_MT_+_9991_10058@34.54.21
aattaactagttttgacaaca

SEQ ID NO: 1870 - DNA, 29 bp, homo sapiens
  tDNAMT_GlyTCC_MT_+_9991_10058@34.62.29
aattaactagttttgacaacattcaaaaa

SEQ ID NO: 1871 - DNA, 23 bp, homo sapiens
  tDNAMT_ProTGG_MT_-_15956_16023@15.37.23
aattagaatcttagctttgggtg

SEQ ID NO: 1872 - DNA, 24 bp, homo sapiens
  tDNAMT_ProTGG_MT_-_15956_16023@15.38.24
aattagaatcttagctttgggtgc

SEQ ID NO: 1873 - DNA, 16 bp, homo sapiens
  tDNA25_GlyGCC_16_-_70812114_70812184@22.37.16,trn
aattctcgcctgccac

SEQ ID NO: 1874 - DNA, 18 bp, homo sapiens
  tDNA25_GlyGCC_16_-_70812114_70812184@22.39.18,trn
aattctcgcctgccacgc

SEQ ID NO: 1875 - DNA, 19 bp, homo sapiens
  tDNAMT_SerGCT_MT_+_12207_12265@43.61.19
acaacatggctttctcacc

SEQ ID NO: 1876 - DNA, 20 bp, homo sapiens
  tDNAMT_SerGCT_MT_+_12207_12265@43.62.20
acaacatggctttctcacca

SEQ ID NO: 1877 - DNA, 16 bp, homo sapiens
  tDNAMT_SerGCT_MT_+_12207_12265@11.26.16
acaagaactgctaact

SEQ ID NO: 1878 - DNA, 17 bp, homo sapiens
  tDNAMT_SerGCT_MT_+_12207_12265@11.27.17
acaagaactgctaactc

SEQ ID NO: 1879 - DNA, 18 bp, homo sapiens
  tDNAMT_SerGCT_MT_+_12207_12265@11.28.18
acaagaactgctaactca

SEQ ID NO: 1880 - DNA, 19 bp, homo sapiens
  tDNAMT_SerGCT_MT_+_12207_12265@11.29.19
acaagaactgctaactcat

SEQ ID NO: 1881 - DNA, 20 bp, homo sapiens
  tDNAMT_SerGCT_MT_+_12207_12265@11.30.20
acaagaactgctaactcatg

SEQ ID NO: 1882 - DNA, 21 bp, homo sapiens
  tDNAMT_SerGCT_MT_+_12207_12265@11.31.21
acaagaactgctaactcatgc

SEQ ID NO: 1883 - DNA, 22 bp, homo sapiens
  tDNAMT_SerGCT_MT_+_12207_12265@11.32.22
acaagaactgctaactcatgcc

SEQ ID NO: 1884 - DNA, 23 bp, homo sapiens
  tDNAMT_SerGCT_MT_+_12207_12265@11.33.23
acaagaactgctaactcatgccc

SEQ ID NO: 1885 - DNA, 25 bp, homo sapiens
  tDNAMT_SerGCT_MT_+_12207_12265@11.35.25
acaagaactgctaactcatgccccc

SEQ ID NO: 1886 - DNA, 19 bp, homo sapiens
  tDNAMT_LysTTT_MT_+_8295_8364@54.72.19,tDNAlookali
acacctctttacagtgacc

SEQ ID NO: 1887 - DNA, 20 bp, homo sapiens
  tDNAMT_LysTTT_MT_+_8295_8364@54.73.20,tDNAlookali
acacctctttacagtgacca

SEQ ID NO: 1888 - DNA, 23 bp, homo sapiens
  tDNAMT_PheGAA_MT_+_577_647@30.52.23
acactgaaaatgtttagacgggc

SEQ ID NO: 1889 - DNA, 24 bp, homo sapiens
  tDNAMT_PheGAA_MT_+_577_647@30.53.24
acactgaaaatgtttagacgggct

SEQ ID NO: 1890 - DNA, 30 bp, homo sapiens
  tDNAMT_ValTAC_MT_+_1602_1670@33.62.30
acacttaggagatttcaacttaacttgacc

SEQ ID NO: 1891 - DNA, 18 bp, homo sapiens
  tDNAMT_LeuTAG_MT_+_12266_12336@15.32.18
acagctatccattggtct

SEQ ID NO: 1892 - DNA, 21 bp, homo sapiens
  tDNAMT_LeuTAG_MT_+_12266_12336@15.35.21
acagctatccattggtcttag

SEQ ID NO: 1893 - DNA, 22 bp, homo sapiens
  tDNAMT_LeuTAG_MT_+_12266_12336@15.36.22
acagctatccattggtcttagg

SEQ ID NO: 1894 - DNA, 23 bp, homo sapiens
  tDNAMT_LeuTAG_MT_+_12266_12336@15.37.23
acagctatccattggtcttaggc

SEQ ID NO: 1895 - DNA, 24 bp, homo sapiens
  tDNAMT_LeuTAG_MT_+_12266_12336@15.38.24
acagctatccattggtcttaggcc

SEQ ID NO: 1896 - DNA, 25 bp, homo sapiens
  tDNAMT_LeuTAG_MT_+_12266_12336@15.39.25
acagctatccattggtcttaggccc

SEQ ID NO: 1897 - DNA, 28 bp, homo sapiens
  tDNAMT_TyrGTA_MT_-_5826_5891@42.69.28
acaggggttaggcctctttttaccacca

SEQ ID NO: 1898 - DNA, 19 bp, homo sapiens
  tDNAMT_PheGAA_MT_+_577_647@55.73.19
acatcaccccataaacacc

SEQ ID NO: 1899 - DNA, 20 bp, homo sapiens
  tDNAMT_PheGAA_MT_+_577_647@55.74.20
acatcaccccataaacacca

SEQ ID NO: 1900 - DNA, 22 bp, homo sapiens
  tDNAMT_HisGTG_MT_+_12138_12206@21.42.22
acatcagattgtgaatctgaca

SEQ ID NO: 1901 - DNA, 25 bp, homo sapiens
  tDNAMT_HisGTG_MT_+_12138_12206@21.45.25
acatcagattgtgaatctgacaaca

SEQ ID NO: 1902 - DNA, 26 bp, homo sapiens
  tDNA3_GluTTC_13_-_45492062_45492133@5.30.26,tDNA1
acatggtctagcggttaggattcctg

SEQ ID NO: 1903 - DNA, 27 bp, homo sapiens
  tDNA3_GluTTC_13_-_45492062_45492133@5.31.27,tDNA1
acatggtctagcggttaggattcctgg

SEQ ID NO: 1904 - DNA, 17 bp, homo sapiens
  tDNAMT_LysTTT_MT_+_8295_8364@50.66.17,tDNAlookali
accaacacctctttaca

SEQ ID NO: 1905 - DNA, 22 bp, homo sapiens
  tDNAMT_LysTTT_MT_+_8295_8364@50.71.22,tDNAlookali
accaacacctctttacagtgac

SEQ ID NO: 1906 - DNA, 23 bp, homo sapiens
  tDNAMT_LysTTT_MT_+_8295_8364@50.72.23,tDNAlookali
accaacacctctttacagtgacc

SEQ ID NO: 1907 - DNA, 24 bp, homo sapiens
  tDNAMT_LysTTT_MT_+_8295_8364@50.73.24,tDNAlookali
accaacacctctttacagtgacca

SEQ ID NO: 1908 - DNA, 25 bp, homo sapiens
  tDNA4_LeuTAA_11_+_59319228_59319310@1.25.25
accagaatggccgagtggttaaggc

SEQ ID NO: 1909 - DNA, 17 bp, homo sapiens
  tDNA83_LeuTAA_6_+_144537684_144537766@1.17.17
accaggatggccgagtg

SEQ ID NO: 1910 - DNA, 18 bp, homo sapiens
  tDNA83_LeuTAA_6_+_144537684_144537766@1.18.18
accaggatggccgagtgg

SEQ ID NO: 1911 - DNA, 21 bp, homo sapiens
  tDNA83_LeuTAA_6_+_144537684_144537766@1.21.21
accaggatggccgagtggtta

SEQ ID NO: 1912 - DNA, 22 bp, homo sapiens
  tDNA83_LeuTAA_6_+_144537684_144537766@1.22.22
accaggatggccgagtggttaa

SEQ ID NO: 1913 - DNA, 24 bp, homo sapiens
  tDNA83_LeuTAA_6_+_144537684_144537766@1.24.24
accaggatggccgagtggttaagg

SEQ ID NO: 1914 - DNA, 25 bp, homo sapiens
  tDNA83_LeuTAA_6_+_144537684_144537766@1.25.25
accaggatggccgagtggttaaggc

SEQ ID NO: 1915 - DNA, 17 bp, homo sapiens
  tDNA1_MetCAT_9_+_19403996_19404070@62.78.17,tDNA6
accatcctctgctacca

SEQ ID NO: 1916 - DNA, 20 bp, homo sapiens
  tDNA32_MetCAT_1_+_153643726_153643797@37.56.20,tr
acccagaggtcgatggatcg

SEQ ID NO: 1917 - DNA, 21 bp, homo sapiens
  tDNA32_MetCAT_1_+_153643726_153643797@37.57.21,tr
acccagaggtcgatggatcga

SEQ ID NO: 1918 - DNA, 22 bp, homo sapiens
  tDNA32_MetCAT_1_+_153643726_153643797@37.58.22,tr
acccagaggtcgatggatcgaa

SEQ ID NO: 1919 - DNA, 23 bp, homo sapiens
  tDNA32_MetCAT_1_+_153643726_153643797@37.59.23,tr
acccagaggtcgatggatcgaaa

SEQ ID NO: 1920 - DNA, 24 bp, homo sapiens
  tDNA32_MetCAT_1_+_153643726_153643797@37.60.24,tr
acccagaggtcgatggatcgaaac

SEQ ID NO: 1921 - DNA, 17 bp, homo sapiens
  tDNA83_LeuTAA_6_+_144537684_144537766@69.85.17
accccactcctggtacc

SEQ ID NO: 1922 - DNA, 18 bp, homo sapiens
  tDNA83_LeuTAA_6_+_144537684_144537766@69.86.18
accccactcctggtacca

SEQ ID NO: 1923 - DNA, 18 bp, homo sapiens
  tDNAMT_IleGAT_MT_+_4263_4331@55.72.18
acccccttatttctacca

SEQ ID NO: 1924 - DNA, 18 bp, homo sapiens
  tDNA14_ThrCGT_17_+_29877093_29877164@58.75.18,trn
accccgtccgtgcctcca

SEQ ID NO: 1925 - DNA, 17 bp, homo sapiens
  tDNAMT_HisGTG_MT_+_12138_12206@56.72.17
accccttatttacccca

SEQ ID NO: 1926 - DNA, 18 bp, homo sapiens
  tDNA2_SerTGA_10_+_69524261_69524342@68.85.18
accctgctcgctgcgcca

SEQ ID NO: 1927 - DNA, 18 bp, homo sapiens
  tDNAMT_MetCAT_MT_+_4402_4469@54.71.18
acccttcccgtactacca

SEQ ID NO: 1928 - DNA, 30 bp, homo sapiens
  tDNA59_GluCTC_1_+_249168447_249168518@37.66.30,tr
accgccgcggcccgggttcgattcccggtc

SEQ ID NO: 1929 - DNA, 18 bp, homo sapiens
  tDNA19_ArgTCG_17_+_73031208_73031280@2.19.18
accgcgtggcctaatgga

SEQ ID NO: 1930 - DNA, 18 bp, homo sapiens
  tDNAMT_PheGAA_MT_+_577_647@14.31.18
acctcctcaaagcaatac

SEQ ID NO: 1931 - DNA, 18 bp, homo sapiens
  tDNAMT_LysTTT_MT_+_8295_8364@56.73.18,tDNAlookali
acctctttacagtgacca

SEQ ID NO: 1932 - DNA, 20 bp, homo sapiens
  tDNAMT_ThrTGT_MT_+_15888_15953@50.69.20
acctttttccaaggacacca

SEQ ID NO: 1933 - DNA, 20 bp, homo sapiens
  tDNAMT_HisGTG_MT_+_12138_12206@53.72.20
acgaccccttatttacccca

SEQ ID NO: 1934 - DNA, 30 bp, homo sapiens
  tDNA144_AspGTC_6_-_27551236_27551307@37.66.30,trn
acgcgggagaccggggttcgattccccgac

SEQ ID NO: 1935 - DNA, 18 bp, homo sapiens
  tDNA141_LeuCAA_6_-_27570348_27570454@32.49.18,trn
actcaagttctggtctcc

SEQ ID NO: 1936 - DNA, 19 bp, homo sapiens
  tDNA100_LeuCAA_6_-_28864000_28864105@32.50.19,trn
actcaagttctggtctcca

SEQ ID NO: 1937 - DNA, 20 bp, homo sapiens
  tDNA100_LeuCAA_6_-_28864000_28864105@32.51.20,trn
actcaagttctggtctccaa

SEQ ID NO: 1938 - DNA, 21 bp, homo sapiens
  tDNA58_LeuCAA_1_+_249168054_249168159@32.52.21
actcaagttctggtctccgga

SEQ ID NO: 1939 - DNA, 29 bp, homo sapiens
  tDNAMT_SerGCT_MT_+_12207_12265@24.52.29
actcatgcccccatgtctaacaacatggc

SEQ ID NO: 1940 - DNA, 16 bp, homo sapiens
  tDNA131_GlnCTG_6_-_27759135_27759206@31.46.16,trn
actctgaatccagcga

SEQ ID NO: 1941 - DNA, 18 bp, homo sapiens
  tDNA131_GlnCTG_6_-_27759135_27759206@31.48.18,trn
actctgaatccagcgatc

SEQ ID NO: 1942 - DNA, 19 bp, homo sapiens
  tDNA131_GlnCTG_6_-_27759135_27759206@31.49.19,trn
actctgaatccagcgatcc

SEQ ID NO: 1943 - DNA, 20 bp, homo sapiens
  tDNA131_GlnCTG_6_-_27759135_27759206@31.50.20,trn
actctgaatccagcgatccg

SEQ ID NO: 1944 - DNA, 21 bp, homo sapiens
  tDNA131_GlnCTG_6_-_27759135_27759206@31.51.21,trn
actctgaatccagcgatccga

SEQ ID NO: 1945 - DNA, 23 bp, homo sapiens
  tDNA131_GlnCTG_6_-_27759135_27759206@31.53.23,trn
actctgaatccagcgatccgagt

SEQ ID NO: 1946 - DNA, 25 bp, homo sapiens
  tDNA131_GlnCTG_6_-_27759135_27759206@31.55.25,trn
actctgaatccagcgatccgagttc

SEQ ID NO: 1947 - DNA, 16 bp, homo sapiens
  tDNA111_HisGTG_1_-_147774845_147774916@24.39.16,t
actctgcgttgtggcc

SEQ ID NO: 1948 - DNA, 17 bp, homo sapiens
  tDNA111_HisGTG_1_-_147774845_147774916@24.40.17,t
actctgcgttgtggccg

SEQ ID NO: 1949 - DNA, 18 bp, homo sapiens
  tDNA111_HisGTG_1_-_147774845_147774916@24.41.18,t
actctgcgttgtggccgc

SEQ ID NO: 1950 - DNA, 16 bp, homo sapiens
  tDNA22_GlnCTG_1_+_147800937_147801008@24.39.16,tr
actctggactctgaat

SEQ ID NO: 1951 - DNA, 17 bp, homo sapiens
  tDNA22_GlnCTG_1_+_147800937_147801008@24.40.17,tr
actctggactctgaatc

SEQ ID NO: 1952 - DNA, 18 bp, homo sapiens
  tDNA22_GlnCTG_1_+_147800937_147801008@24.41.18,tr
actctggactctgaatcc

SEQ ID NO: 1953 - DNA, 19 bp, homo sapiens
  tDNA22_GlnCTG_1_+_147800937_147801008@24.42.19,tr
actctggactctgaatcca

SEQ ID NO: 1954 - DNA, 20 bp, homo sapiens
  tDNA22_GlnCTG_1_+_147800937_147801008@24.43.20,tr
actctggactctgaatccag

SEQ ID NO: 1955 - DNA, 21 bp, homo sapiens
  tDNA22_GlnCTG_1_+_147800937_147801008@24.44.21,tr
actctggactctgaatccagc

SEQ ID NO: 1956 - DNA, 22 bp, homo sapiens
  tDNA131_GlnCTG_6_-_27759135_27759206@24.45.22,trn
actctggactctgaatccagcg

SEQ ID NO: 1957 - DNA, 23 bp, homo sapiens
  tDNA131_GlnCTG_6_-_27759135_27759206@24.46.23,trn
actctggactctgaatccagcga

SEQ ID NO: 1958 - DNA, 25 bp, homo sapiens
  tDNA131_GlnCTG_6_-_27759135_27759206@24.48.25,trn
actctggactctgaatccagcgatc

SEQ ID NO: 1959 - DNA, 30 bp, homo sapiens
  tDNA131_GlnCTG_6_-_27759135_27759206@24.53.30,trn
actctggactctgaatccagcgatccgagt

SEQ ID NO: 1960 - DNA, 17 bp, homo sapiens
  tDNA130_GlnTTG_6_-_27763640_27763711@24.40.17,trn
actctggactttgaatc

SEQ ID NO: 1961 - DNA, 30 bp, homo sapiens
  tDNAMT_GlyTCC_MT_+_9991_10058@1.30.30
actcttttagtataaatagtaccgttaact

SEQ ID NO: 1962 - DNA, 21 bp, homo sapiens
  tDNAMT_PheGAA_MT_+_577_647@32.52.21
actgaaaatgtttagacgggc

SEQ ID NO: 1963 - DNA, 22 bp, homo sapiens
  tDNAMT_PheGAA_MT_+_577_647@32.53.22
actgaaaatgtttagacgggct

SEQ ID NO: 1964 - DNA, 16 bp, homo sapiens
  tDNAMT_ValTAC_MT_+_1602_1670@50.65.16
acttaacttgaccgct

SEQ ID NO: 1965 - DNA, 17 bp, homo sapiens
  tDNAMT_ValTAC_MT_+_1602_1670@50.66.17
acttaacttgaccgctc

SEQ ID NO: 1966 - DNA, 18 bp, homo sapiens
  tDNAMT_ValTAC_MT_+_1602_1670@50.67.18
acttaacttgaccgctct

SEQ ID NO: 1967 - DNA, 19 bp, homo sapiens
  tDNAMT_ValTAC_MT_+_1602_1670@50.68.19
acttaacttgaccgctctg

SEQ ID NO: 1968 - DNA, 20 bp, homo sapiens
  tDNAMT_ValTAC_MT_+_1602_1670@50.69.20
acttaacttgaccgctctga

SEQ ID NO: 1969 - DNA, 21 bp, homo sapiens
  tDNAMT_ValTAC_MT_+_1602_1670@50.70.21
acttaacttgaccgctctgac

SEQ ID NO: 1970 - DNA, 22 bp, homo sapiens
  tDNAMT_ValTAC_MT_+_1602_1670@50.71.22
acttaacttgaccgctctgacc

SEQ ID NO: 1971 - DNA, 23 bp, homo sapiens
  tDNAMT_ValTAC_MT_+_1602_1670@50.72.23
acttaacttgaccgctctgacca

SEQ ID NO: 1972 - DNA, 28 bp, homo sapiens
  tDNAMT_ValTAC_MT_+_1602_1670@35.62.28
acttaggagatttcaacttaacttgacc

SEQ ID NO: 1973 - DNA, 29 bp, homo sapiens
  tDNAMT_ValTAC_MT_+_1602_1670@35.63.29
acttaggagatttcaacttaacttgaccg

SEQ ID NO: 1974 - DNA, 30 bp, homo sapiens
  tDNAMT_ValTAC_MT_+_1602_1670@35.64.30
acttaggagatttcaacttaacttgaccgc

SEQ ID NO: 1975 - DNA, 16 bp, homo sapiens
  tDNAMT_ValTAC_MT_+_1602_1670@55.70.16
acttgaccgctctgac

SEQ ID NO: 1976 - DNA, 17 bp, homo sapiens
  tDNAMT_ValTAC_MT_+_1602_1670@55.71.17
acttgaccgctctgacc

SEQ ID NO: 1977 - DNA, 18 bp, homo sapiens
  tDNAMT_ValTAC_MT_+_1602_1670@55.72.18
acttgaccgctctgacca

SEQ ID NO: 1978 - DNA, 20 bp, homo sapiens
  tDNA130_GlnTTG_6_-_27763640_27763711@31.50.20,trn
actttgaatccagcgatccg

SEQ ID NO: 1979 - DNA, 23 bp, homo sapiens
  tDNA130_GlnTTG_6_-_27763640_27763711@31.53.23,trn
actttgaatccagcgatccgagt

SEQ ID NO: 1980 - DNA, 18 bp, homo sapiens
  tDNAMT_LeuTAG_MT_+_12266_12336@1.18.18
acttttaaaggataacag

SEQ ID NO: 1981 - DNA, 16 bp, homo sapiens
  tDNAMT_ProTGG_MT_-_15956_16023@56.71.16
actttttctctgacca

SEQ ID NO: 1982 - DNA, 21 bp, homo sapiens
  tDNAMT_SerGCT_MT_+_12207_12265@2.22.21
agaaagctcacaagaactgct

SEQ ID NO: 1983 - DNA, 20 bp, homo sapiens
  tDNAMT_IleGAT_MT_+_4263_4331@1.20.20
agaaatatgtctgataaaag

SEQ ID NO: 1984 - DNA, 21 bp, homo sapiens
  tDNAMT_IleGAT_MT_+_4263_4331@1.21.21
agaaatatgtctgataaaaga

SEQ ID NO: 1985 - DNA, 30 bp, homo sapiens
  tDNAMT_IleGAT_MT_+_4263_4331@1.30.30
agaaatatgtctgataaaagagttactttg

SEQ ID NO: 1986 - DNA, 27 bp, homo sapiens
  tDNAMT_LysTTT_MT_+_8295_8364@47.73.27,tDNAlookali
agaaccaacacctctttacagtgacca

SEQ ID NO: 1987 - DNA, 19 bp, homo sapiens
  tDNAMT_SerGCT_MT_+_12207_12265@14.32.19
agaactgctaactcatgcc

SEQ ID NO: 1988 - DNA, 20 bp, homo sapiens
  tDNAMT_SerGCT_MT_+_12207_12265@14.33.20
agaactgctaactcatgccc

SEQ ID NO: 1989 - DNA, 21 bp, homo sapiens
  tDNAMT_SerGCT_MT_+_12207_12265@14.34.21
agaactgctaactcatgcccc

SEQ ID NO: 1990 - DNA, 22 bp, homo sapiens
  tDNAMT_SerGCT_MT_+_12207_12265@14.35.22
agaactgctaactcatgccccc

SEQ ID NO: 1991 - DNA, 23 bp, homo sapiens
  tDNAMT_SerGCT_MT_+_12207_12265@14.36.23
agaactgctaactcatgccccca

SEQ ID NO: 1992 - DNA, 27 bp, homo sapiens
  tDNAMT_SerGCT_MT_+_12207_12265@14.40.27
agaactgctaactcatgcccccatgtc

SEQ ID NO: 1993 - DNA, 29 bp, homo sapiens
  tDNAMT_SerGCT_MT_+_12207_12265@14.42.29
agaactgctaactcatgcccccatgtcta

SEQ ID NO: 1994 - DNA, 18 bp, homo sapiens
  tDNA25_GlyGCC_16_-_70812114_70812184@20.37.18,trn
agaattctcgcctgccac

SEQ ID NO: 1995 - DNA, 20 bp, homo sapiens
  tDNA25_GlyGCC_16_-_70812114_70812184@20.39.20,trn
agaattctcgcctgccacgc

SEQ ID NO: 1996 - DNA, 16 bp, homo sapiens
  tDNAMT_ProTGG_MT_-_15956_16023@54.69.16
agactttttctctgac

SEQ ID NO: 1997 - DNA, 17 bp, homo sapiens
  tDNAMT_ProTGG_MT_-_15956_16023@54.70.17
agactttttctctgacc

SEQ ID NO: 1998 - DNA, 18 bp, homo sapiens
  tDNAMT_ProTGG_MT_-_15956_16023@54.71.18
agactttttctctgacca

SEQ ID NO: 1999 - DNA, 23 bp, homo sapiens
  tDNAMT_LysTTT_MT_+_8295_8364@45.67.23,tDNAlookali
agagaaccaacacctctttacag

SEQ ID NO: 2000 - DNA, 29 bp, homo sapiens
  tDNAMT_LysTTT_MT_+_8295_8364@45.73.29,tDNAlookali
agagaaccaacacctctttacagtgacca

SEQ ID NO: 2001 - DNA, 19 bp, homo sapiens
  tDNA12_CysGCA_3_-_17741392_17741464@36.54.19,tDNA
agatcaagaggtccccggt

SEQ ID NO: 2002 - DNA, 21 bp, homo sapiens
  tDNAMT_ThrTGT_MT_+_15888_15953@42.62.21
agatgaaaacctttttccaag

SEQ ID NO: 2003 - DNA, 30 bp, homo sapiens
  tDNAMT_LysTTT_MT_+_8295_8364@39.68.30,tDNAlookali
agattaagagaaccaacacctctttacagt

SEQ ID NO: 2004 - DNA, 20 bp, homo sapiens
  tDNA34_GlyCCC_16_-_686736_686806@28.47.20,tDNA27_
agattcccattcttgcgacc

SEQ ID NO: 2005 - DNA, 21 bp, homo sapiens
  tDNA34_GlyCCC_16_-_686736_686806@28.48.21,tDNA27_
agattcccattcttgcgaccc

SEQ ID NO: 2006 - DNA, 22 bp, homo sapiens
  tDNA34_GlyCCC_16_-_686736_686806@28.49.22,tDNA27_
agattcccattcttgcgacccg

SEQ ID NO: 2007 - DNA, 23 bp, homo sapiens
  tDNA34_GlyCCC_16_-_686736_686806@28.50.23,tDNA27_
agattcccattcttgcgacccgg

SEQ ID NO: 2008 - DNA, 16 bp, homo sapiens
  tDNAMT_HisGTG_MT_+_12138_12206@26.41.16
agattgtgaatctgac

SEQ ID NO: 2009 - DNA, 17 bp, homo sapiens
  tDNAMT_HisGTG_MT_+_12138_12206@26.42.17
agattgtgaatctgaca

SEQ ID NO: 2010 - DNA, 18 bp, homo sapiens
  tDNAMT_HisGTG_MT_+_12138_12206@26.43.18
agattgtgaatctgacaa

SEQ ID NO: 2011 - DNA, 19 bp, homo sapiens
  tDNAMT_HisGTG_MT_+_12138_12206@26.44.19
agattgtgaatctgacaac

SEQ ID NO: 2012 - DNA, 20 bp, homo sapiens
  tDNAMT_HisGTG_MT_+_12138_12206@26.45.20
agattgtgaatctgacaaca

SEQ ID NO: 2013 - DNA, 21 bp, homo sapiens
  tDNAMT_ValTAC_MT_+_1602_1670@42.62.21
agatttcaacttaacttgacc

SEQ ID NO: 2014 - DNA, 22 bp, homo sapiens
  tDNAMT_ValTAC_MT_+_1602_1670@42.63.22
agatttcaacttaacttgaccg

SEQ ID NO: 2015 - DNA, 24 bp, homo sapiens
  tDNAMT_ValTAC_MT_+_1602_1670@42.65.24
agatttcaacttaacttgaccgct

SEQ ID NO: 2016 - DNA, 26 bp, homo sapiens
  tDNAMT_ValTAC_MT_+_1602_1670@42.67.26
agatttcaacttaacttgaccgctct

SEQ ID NO: 2017 - DNA, 27 bp, homo sapiens
  tDNAMT_ValTAC_MT_+_1602_1670@42.68.27
agatttcaacttaacttgaccgctctg

SEQ ID NO: 2018 - DNA, 28 bp, homo sapiens
  tDNAMT_ValTAC_MT_+_1602_1670@42.69.28
agatttcaacttaacttgaccgctctga

SEQ ID NO: 2019 - DNA, 29 bp, homo sapiens
  tDNAMT_ValTAC_MT_+_1602_1670@42.70.29
agatttcaacttaacttgaccgctctgac

SEQ ID NO: 2020 - DNA, 30 bp, homo sapiens
  tDNAMT_ValTAC_MT_+_1602_1670@42.71.30
agatttcaacttaacttgaccgctctgacc

SEQ ID NO: 2021 - DNA, 16 bp, homo sapiens
  tDNA22_GlnCTG_1_+_147800937_147801008@21.36.16,tr
agcactctggactctg

SEQ ID NO: 2022 - DNA, 17 bp, homo sapiens
  tDNA22_GlnCTG_1_+_147800937_147801008@21.37.17,tr
agcactctggactctga

SEQ ID NO: 2023 - DNA, 18 bp, homo sapiens
  tDNA22_GlnCTG_1_+_147800937_147801008@21.38.18,tr
agcactctggactctgaa

SEQ ID NO: 2024 - DNA, 19 bp, homo sapiens
  tDNA22_GlnCTG_1_+_147800937_147801008@21.39.19,tr
agcactctggactctgaat

SEQ ID NO: 2025 - DNA, 20 bp, homo sapiens
  tDNA22_GlnCTG_1_+_147800937_147801008@21.40.20,tr
agcactctggactctgaatc

SEQ ID NO: 2026 - DNA, 21 bp, homo sapiens
  tDNA22_GlnCTG_1_+_147800937_147801008@21.41.21,tr
agcactctggactctgaatcc

SEQ ID NO: 2027 - DNA, 22 bp, homo sapiens
  tDNA22_GlnCTG_1_+_147800937_147801008@21.42.22,tr
agcactctggactctgaatcca

SEQ ID NO: 2028 - DNA, 23 bp, homo sapiens
  tDNA22_GlnCTG_1_+_147800937_147801008@21.43.23,tr
agcactctggactctgaatccag

SEQ ID NO: 2029 - DNA, 24 bp, homo sapiens
  tDNA22_GlnCTG_1_+_147800937_147801008@21.44.24,tr
agcactctggactctgaatccagc

SEQ ID NO: 2030 - DNA, 25 bp, homo sapiens
  tDNA131_GlnCTG_6_-_27759135_27759206@21.45.25,trn
agcactctggactctgaatccagcg

SEQ ID NO: 2031 - DNA, 26 bp, homo sapiens
  tDNA131_GlnCTG_6_-_27759135_27759206@21.46.26,trn
agcactctggactctgaatccagcga

SEQ ID NO: 2032 - DNA, 30 bp, homo sapiens
  tDNA131_GlnCTG_6_-_27759135_27759206@21.50.30,trn
agcactctggactctgaatccagcgatccg

SEQ ID NO: 2033 - DNA, 20 bp, homo sapiens
  tDNA130_GlnTTG_6_-_27763640_27763711@21.40.20,trn
agcactctggactttgaatc

SEQ ID NO: 2034 - DNA, 23 bp, homo sapiens
  tDNA61_MetCAT_6_+_27745664_27745735@1.23.23,tDNA3
agcagagtggcgcagcggaagcg

SEQ ID NO: 2035 - DNA, 30 bp, homo sapiens
  tDNA61_MetCAT_6_+_27745664_27745735@1.30.30,tDNA3
agcagagtggcgcagcggaagcgtgctggg

SEQ ID NO: 2036 - DNA, 18 bp, homo sapiens
  tDNAMT_TyrGTA_MT_-_5826_5891@19.36.18
agcattggactgtaaatc

SEQ ID NO: 2037 - DNA, 19 bp, homo sapiens
  tDNAMT_TyrGTA_MT_-_5826_5891@19.37.19
agcattggactgtaaatct

SEQ ID NO: 2038 - DNA, 20 bp, homo sapiens
  tDNAMT_TyrGTA_MT_-_5826_5891@19.38.20
agcattggactgtaaatcta

SEQ ID NO: 2039 - DNA, 19 bp, homo sapiens
  tDNA6_ValTAC_10_-_5895674_5895746@58.76.19,tDNA16
agccccagtggaaccacca

SEQ ID NO: 2040 - DNA, 20 bp, homo sapiens
  tDNA5_LysTTT_11_+_59323902_59323974@-1A.19.20,trn
agcccggatagctcagtcgg

SEQ ID NO: 2041 - DNA, 19 bp, homo sapiens
  tDNA111_HisGTG_1_-_147774845_147774916@-1A.18.19,
agccgtgatcgtatagtgg

SEQ ID NO: 2042 - DNA, 20 bp, homo sapiens
  tDNA111_HisGTG_1_-_147774845_147774916@-1A.19.20,
agccgtgatcgtatagtggt

SEQ ID NO: 2043 - DNA, 21 bp, homo sapiens
  tDNA111_HisGTG_1_-_147774845_147774916@-1A.20.21,
agccgtgatcgtatagtggtt

SEQ ID NO: 2044 - DNA, 22 bp, homo sapiens
  tDNA111_HisGTG_1_-_147774845_147774916@-1A.21.22,
agccgtgatcgtatagtggtta

SEQ ID NO: 2045 - DNA, 23 bp, homo sapiens
  tDNA111_HisGTG_1_-_147774845_147774916@-1A.22.23,
agccgtgatcgtatagtggttag

SEQ ID NO: 2046 - DNA, 24 bp, homo sapiens
  tDNA111_HisGTG_1_-_147774845_147774916@-1A.23.24,
agccgtgatcgtatagtggttagt

SEQ ID NO: 2047 - DNA, 25 bp, homo sapiens
  tDNA111_HisGTG_1_-_147774845_147774916@-1A.24.25,
agccgtgatcgtatagtggttagta

SEQ ID NO: 2048 - DNA, 18 bp, homo sapiens
  tDNA3_GluTTC_13_-_45492062_45492133@14.31.18,tDNA
agcggttaggattcctgg

SEQ ID NO: 2049 - DNA, 24 bp, homo sapiens
  tDNA3_GluTTC_13_-_45492062_45492133@14.37.24,tDNA
agcggttaggattcctggttttca

SEQ ID NO: 2050 - DNA, 19 bp, homo sapiens
  tDNAMT_LeuTAG_MT_+_12266_12336@17.35.19
agctatccattggtcttag

SEQ ID NO: 2051 - DNA, 20 bp, homo sapiens
  tDNAMT_LeuTAG_MT_+_12266_12336@17.36.20
agctatccattggtcttagg

SEQ ID NO: 2052 - DNA, 30 bp, homo sapiens
  tDNAMT_MetCAT_MT_+_4402_4469@19.48.30
agctatcgggcccataccccgaaaatgttg

SEQ ID NO: 2053 - DNA, 19 bp, homo sapiens
  tDNAMT_SerGCT_MT_+_12207_12265@6.24.19
agctcacaagaactgctaa

SEQ ID NO: 2054 - DNA, 20 bp, homo sapiens
  tDNAMT_SerGCT_MT_+_12207_12265@6.25.20
agctcacaagaactgctaac

SEQ ID NO: 2055 - DNA, 23 bp, homo sapiens
  tDNAMT_SerGCT_MT_+_12207_12265@6.28.23
agctcacaagaactgctaactca

SEQ ID NO: 2056 - DNA, 24 bp, homo sapiens
  tDNA7_CysGCA_3_-_131947944_131948015@9.32.24,tDNA
agctcagtggtagagcatttgact

SEQ ID NO: 2057 - DNA, 25 bp, homo sapiens
  tDNA7_CysGCA_3_-_131947944_131948015@9.33.25,tDNA
agctcagtggtagagcatttgactg

SEQ ID NO: 2058 - DNA, 26 bp, homo sapiens
  tDNA7_CysGCA_3_-_131947944_131948015@9.34.26,tDNA
agctcagtggtagagcatttgactgc

SEQ ID NO: 2059 - DNA, 21 bp, homo sapiens
  tDNAMT_CysGCA_MT_-_5761_5826@1.21.21
agctccgaggtgattttcata

SEQ ID NO: 2060 - DNA, 22 bp, homo sapiens
  tDNAMT_CysGCA_MT_-_5761_5826@1.22.22
agctccgaggtgattttcatat

SEQ ID NO: 2061 - DNA, 23 bp, homo sapiens
  tDNAMT_CysGCA_MT_-_5761_5826@1.23.23
agctccgaggtgattttcatatt

SEQ ID NO: 2062 - DNA, 24 bp, homo sapiens
  tDNAMT_CysGCA_MT_-_5761_5826@1.24.24
agctccgaggtgattttcatattg

SEQ ID NO: 2063 - DNA, 30 bp, homo sapiens
  tDNAMT_CysGCA_MT_-_5761_5826@1.30.30
agctccgaggtgattttcatattgaattgc

SEQ ID NO: 2064 - DNA, 25 bp, homo sapiens
  tDNA10_GlyTCC_17_+_8124866_8124937@26.50.25,tDNA1
agctgccttccaagcagttgacccg

SEQ ID NO: 2065 - DNA, 26 bp, homo sapiens
  tDNA10_GlyTCC_17_+_8124866_8124937@26.51.26,tDNA1
agctgccttccaagcagttgacccgg

SEQ ID NO: 2066 - DNA, 24 bp, homo sapiens
  tDNA19_TyrGTA_14_-_21121258_21121351@14.37.24,trn
agctggtagagcggaggactgtag

SEQ ID NO: 2067 - DNA, 24 bp, homo sapiens
  tDNAMT_IleGAT_MT_+_4263_4331@48.71.24
agcttaaacccccttatttctacc

SEQ ID NO: 2068 - DNA, 25 bp, homo sapiens
  tDNAMT_IleGAT_MT_+_4263_4331@48.72.25
agcttaaacccccttatttctacca

SEQ ID NO: 2069 - DNA, 23 bp, homo sapiens
  tDNAMT_CysGCA_MT_-_5761_5826@45.67.23
agcttcaaacctgccggggcttc

SEQ ID NO: 2070 - DNA, 24 bp, homo sapiens
  tDNAMT_CysGCA_MT_-_5761_5826@45.68.24
agcttcaaacctgccggggcttcc

SEQ ID NO: 2071 - DNA, 25 bp, homo sapiens
  tDNAMT_CysGCA_MT_-_5761_5826@45.69.25
agcttcaaacctgccggggcttcca

SEQ ID NO: 2072 - DNA, 23 bp, homo sapiens
  tDNA19_TyrGTA_14_-_21121258_21121351@28.50.23,trn
aggactgtagatccttaggtcgc

SEQ ID NO: 2073 - DNA, 25 bp, homo sapiens
  tDNAMT_ValTAC_MT_+_1602_1670@39.63.25
aggagatttcaacttaacttgaccg

SEQ ID NO: 2074 - DNA, 30 bp, homo sapiens
  tDNAMT_ValTAC_MT_+_1602_1670@39.68.30
aggagatttcaacttaacttgaccgctctg

SEQ ID NO: 2075 - DNA, 21 bp, homo sapiens
  tDNA17_LeuCAG_16_+_57333863_57333945@4.24.21,tDNA
aggatggccgagcggtctaag

SEQ ID NO: 2076 - DNA, 23 bp, homo sapiens
  tDNA17_LeuCAG_16_+_57333863_57333945@4.26.23,tDNA
aggatggccgagcggtctaaggc

SEQ ID NO: 2077 - DNA, 29 bp, homo sapiens
  tDNA17_LeuCAG_16_+_57333863_57333945@4.32.29,tDNA
aggatggccgagcggtctaaggcgctgcg

SEQ ID NO: 2078 - DNA, 21 bp, homo sapiens
  tDNA141_LeuCAA_6_-_27570348_27570454@4.24.21,tDNA
aggatggccgagtggtctaag

SEQ ID NO: 2079 - DNA, 19 bp, homo sapiens
  tDNAMT_TyrGTA_MT_-_5826_5891@51.69.19
aggcctctttttaccacca

SEQ ID NO: 2080 - DNA, 18 bp, homo sapiens
  tDNA126_LeuAAG_6_-_28446400_28446481@36.53.18,trn
aggctccagtctcttcgg

SEQ ID NO: 2081 - DNA, 22 bp, homo sapiens
  tDNA16_LeuAAG_5_-_180601044_180601125@36.57.22,tr
aggctccagtctcttcggaggc

SEQ ID NO: 2082 - DNA, 19 bp, homo sapiens
  tDNA126_LeuAAG_6_-_28446400_28446481@36.54.19,trn
aggctccagtctcttcggg

SEQ ID NO: 2083 - DNA, 22 bp, homo sapiens
  tDNA126_LeuAAG_6_-_28446400_28446481@36.57.22,trn
aggctccagtctcttcgggggc

SEQ ID NO: 2084 - DNA, 25 bp, homo sapiens
  tDNA126_LeuAAG_6_-_28446400_28446481@36.60.25,trn
aggctccagtctcttcgggggcgtg

SEQ ID NO: 2085 - DNA, 16 bp, homo sapiens
  tDNA12_ArgCCT_16_+_3243918_3243990@42.57.16,tDNA3
agggattgtgggttcg

SEQ ID NO: 2086 - DNA, 22 bp, homo sapiens
  tDNA3_ArgCCT_7_+_139025446_139025518@42.63.22,trn
agggattgtgggttcgagtccc

SEQ ID NO: 2087 - DNA, 17 bp, homo sapiens
  tDNA12_ProTGG_11_-_75946869_75946940@14.30.17
aggggtatgattctcgg

SEQ ID NO: 2088 - DNA, 25 bp, homo sapiens
  tDNAMT_TyrGTA_MT_-_5826_5891@44.68.25
aggggttaggcctctttttaccacc

SEQ ID NO: 2089 - DNA, 26 bp, homo sapiens
  tDNAMT_TyrGTA_MT_-_5826_5891@44.69.26
aggggttaggcctctttttaccacca

SEQ ID NO: 2090 - DNA, 27 bp, homo sapiens
  tDNA1_ArgCCG_16_+_3200675_3200747@50.76.27,tDNA11
agggttcgagtcccttcgtggtcgcca

SEQ ID NO: 2091 - DNA, 25 bp, homo sapiens
  tDNA78_LeuAAG_6_+_28956779_28956860@-1A.24.25,trn
aggtagcgtggccgagcggtctaag

SEQ ID NO: 2092 - DNA, 18 bp, homo sapiens
  tDNAMT_MetCAT_MT_+_4402_4469@1.18.18
agtaaggtcagctaaata

SEQ ID NO: 2093 - DNA, 20 bp, homo sapiens
  tDNAMT_MetCAT_MT_+_4402_4469@1.20.20
agtaaggtcagctaaataag

SEQ ID NO: 2094 - DNA, 21 bp, homo sapiens
  tDNAMT_MetCAT_MT_+_4402_4469@1.21.21
agtaaggtcagctaaataagc

SEQ ID NO: 2095 - DNA, 27 bp, homo sapiens
  tDNAMT_MetCAT_MT_+_4402_4469@1.27.27
agtaaggtcagctaaataagctatcgg

SEQ ID NO: 2096 - DNA, 28 bp, homo sapiens
  tDNAMT_MetCAT_MT_+_4402_4469@1.28.28
agtaaggtcagctaaataagctatcggg

SEQ ID NO: 2097 - DNA, 30 bp, homo sapiens
  tDNAMT_MetCAT_MT_+_4402_4469@1.30.30
agtaaggtcagctaaataagctatcgggcc

SEQ ID NO: 2098 - DNA, 18 bp, homo sapiens
  tDNA111_HisGTG_1_-_147774845_147774916@21.38.18,t
agtactctgcgttgtggc

SEQ ID NO: 2099 - DNA, 19 bp, homo sapiens
  tDNA111_HisGTG_1_-_147774845_147774916@21.39.19,t
agtactctgcgttgtggcc

SEQ ID NO: 2100 - DNA, 20 bp, homo sapiens
  tDNA111_HisGTG_1_-_147774845_147774916@21.40.20,t
agtactctgcgttgtggccg

SEQ ID NO: 2101 - DNA, 19 bp, homo sapiens
  tDNA145_SerAGA_6_-_27521192_27521273@-1A.18.19,tr
agtagtcgtggccgagtgg

SEQ ID NO: 2102 - DNA, 19 bp, homo sapiens
  tDNA12_TrpCCA_17_+_19411494_19411565@57.75.19
agtcacgtcggggtcacca

SEQ ID NO: 2103 - DNA, 19 bp, homo sapiens
  tDNA3_ArgTCT_11_+_59318767_59318852@58.76.19,tDNA
agtcccaccagagtcgcca

SEQ ID NO: 2104 - DNA, 19 bp, homo sapiens
  tDNAMT_AsnGTT_MT_-_5657_5729@58.76.19,tDNAlookali
agtcccattggtctagcca

SEQ ID NO: 2105 - DNA, 19 bp, homo sapiens
  tDNAMT_GluTTC_MT_-_14674_14742@54.72.19,tDNAlooka
agtccgtgcgagaatacca

SEQ ID NO: 2106 - DNA, 17 bp, homo sapiens
  tDNA149_LysTTT_6_-_27302769_27302841@14.30.17,trn
agtcggtagagcatcag

SEQ ID NO: 2107 - DNA, 18 bp, homo sapiens
  tDNA149_LysTTT_6_-_27302769_27302841@14.31.18,trn
agtcggtagagcatcaga

SEQ ID NO: 2108 - DNA, 19 bp, homo sapiens
  tDNA149_LysTTT_6_-_27302769_27302841@14.32.19,trn
agtcggtagagcatcagac

SEQ ID NO: 2109 - DNA, 17 bp, homo sapiens
  tDNA6_LysCTT_19_-_52425396_52425468@14.30.17,tDNA
agtcggtagagcatgag

SEQ ID NO: 2110 - DNA, 18 bp, homo sapiens
  tDNA6_LysCTT_19_-_52425396_52425468@14.31.18,tDNA
agtcggtagagcatgaga

SEQ ID NO: 2111 - DNA, 19 bp, homo sapiens
  tDNA6_LysCTT_19_-_52425396_52425468@14.32.19,tDNA
agtcggtagagcatgagac

SEQ ID NO: 2112 - DNA, 20 bp, homo sapiens
  tDNA6_LysCTT_19_-_52425396_52425468@14.33.20,tDNA
agtcggtagagcatgagact

SEQ ID NO: 2113 - DNA, 18 bp, homo sapiens
  tDNA4_LysCTT_18_-_43669271_43669343@14.31.18,tDNA
agtcggtagagcatggga

SEQ ID NO: 2114 - DNA, 19 bp, homo sapiens
  tDNA4_LysCTT_18_-_43669271_43669343@14.32.19,tDNA
agtcggtagagcatgggac

SEQ ID NO: 2115 - DNA, 20 bp, homo sapiens
  tDNA4_LysCTT_18_-_43669271_43669343@14.33.20,tDNA
agtcggtagagcatgggact

SEQ ID NO: 2116 - DNA, 18 bp, homo sapiens
  tDNAMT_TyrGTA_MT_-_5826_5891@14.31.18
agtgaagcattggactgt

SEQ ID NO: 2117 - DNA, 19 bp, homo sapiens
  tDNAMT_TyrGTA_MT_-_5826_5891@14.32.19
agtgaagcattggactgta

SEQ ID NO: 2118 - DNA, 20 bp, homo sapiens
  tDNAMT_TyrGTA_MT_-_5826_5891@14.33.20
agtgaagcattggactgtaa

SEQ ID NO: 2119 - DNA, 21 bp, homo sapiens
  tDNAMT_TyrGTA_MT_-_5826_5891@14.34.21
agtgaagcattggactgtaaa

SEQ ID NO: 2120 - DNA, 23 bp, homo sapiens
  tDNAMT_TyrGTA_MT_-_5826_5891@14.36.23
agtgaagcattggactgtaaatc

SEQ ID NO: 2121 - DNA, 26 bp, homo sapiens
  tDNA61_MetCAT_6_+_27745664_27745735@6.31.26,tDNA3
agtggcgcagcggaagcgtgctgggc

SEQ ID NO: 2122 - DNA, 16 bp, homo sapiens
  tDNA91_GlyCCC_1_-_149680210_149680280@14.29.16,tr
agtggtagaattctcg

SEQ ID NO: 2123 - DNA, 17 bp, homo sapiens
  tDNA91_GlyCCC_1_-_149680210_149680280@14.30.17,tr
agtggtagaattctcgc

SEQ ID NO: 2124 - DNA, 18 bp, homo sapiens
  tDNA91_GlyCCC_1_-_149680210_149680280@14.31.18,tr
agtggtagaattctcgcc

SEQ ID NO: 2125 - DNA, 19 bp, homo sapiens
  tDNA91_GlyCCC_1_-_149680210_149680280@14.32.19,tr
agtggtagaattctcgcct

SEQ ID NO: 2126 - DNA, 21 bp, homo sapiens
  tDNA18_GlyGCC_16_+_70822597_70822667@14.34.21,trn
agtggtagaattctcgcctgc

SEQ ID NO: 2127 - DNA, 17 bp, homo sapiens
  tDNA7_CysGCA_3_-_131947944_131948015@14.30.17,trn
agtggtagagcatttga

SEQ ID NO: 2128 - DNA, 19 bp, homo sapiens
  tDNA7_CysGCA_3_-_131947944_131948015@14.32.19,trn
agtggtagagcatttgact

SEQ ID NO: 2129 - DNA, 20 bp, homo sapiens
  tDNA7_CysGCA_3_-_131947944_131948015@14.33.20,trn
agtggtagagcatttgactg

SEQ ID NO: 2130 - DNA, 21 bp, homo sapiens
  tDNA7_CysGCA_3_-_131947944_131948015@14.34.21,trn
agtggtagagcatttgactgc

SEQ ID NO: 2131 - DNA, 26 bp, homo sapiens
  tDNA7_CysGCA_3_-_131947944_131948015@14.39.26,trn
agtggtagagcatttgactgcagatc

SEQ ID NO: 2132 - DNA, 17 bp, homo sapiens
  tDNA25_GluCTC_2_-_71273488_71273560@14.30.17,tDNA
agtggttaggattcggc

SEQ ID NO: 2133 - DNA, 18 bp, homo sapiens
  tDNA25_GluCTC_2_-_71273488_71273560@14.31.18,tDNA
agtggttaggattcggcg

SEQ ID NO: 2134 - DNA, 19 bp, homo sapiens
  tDNA25_GluCTC_2_-_71273488_71273560@14.32.19,tDNA
agtggttaggattcggcgc

SEQ ID NO: 2135 - DNA, 20 bp, homo sapiens
  tDNA25_GluCTC_2_-_71273488_71273560@14.33.20,tDNA
agtggttaggattcggcgct

SEQ ID NO: 2136 - DNA, 21 bp, homo sapiens
  tDNA25_GluCTC_2_-_71273488_71273560@14.34.21,tDNA
agtggttaggattcggcgctc

SEQ ID NO: 2137 - DNA, 22 bp, homo sapiens
  tDNA25_GluCTC_2_-_71273488_71273560@14.35.22,tDNA
agtggttaggattcggcgctct

SEQ ID NO: 2138 - DNA, 23 bp, homo sapiens
  tDNA25_GluCTC_2_-_71273488_71273560@14.36.23,tDNA
agtggttaggattcggcgctctc

SEQ ID NO: 2139 - DNA, 24 bp, homo sapiens
  tDNA25_GluCTC_2_-_71273488_71273560@14.37.24,tDNA
agtggttaggattcggcgctctca

SEQ ID NO: 2140 - DNA, 25 bp, homo sapiens
  tDNA59_GluCTC_1_+_249168447_249168518@14.38.25,tr
agtggttaggattcggcgctctcac

SEQ ID NO: 2141 - DNA, 26 bp, homo sapiens
  tDNA59_GluCTC_1_+_249168447_249168518@14.39.26,tr
agtggttaggattcggcgctctcacc

SEQ ID NO: 2142 - DNA, 17 bp, homo sapiens
  tDNA106_HisGTG_1_-_149155828_149155899@14.30.17,t
agtggttagtactctgc

SEQ ID NO: 2143 - DNA, 18 bp, homo sapiens
  tDNA106_HisGTG_1_-_149155828_149155899@14.31.18,t
agtggttagtactctgcg

SEQ ID NO: 2144 - DNA, 19 bp, homo sapiens
  tDNA111_HisGTG_1_-_147774845_147774916@14.32.19,t
agtggttagtactctgcgt

SEQ ID NO: 2145 - DNA, 20 bp, homo sapiens
  tDNA111_HisGTG_1_-_147774845_147774916@14.33.20,t
agtggttagtactctgcgtt

SEQ ID NO: 2146 - DNA, 21 bp, homo sapiens
  tDNA111_HisGTG_1_-_147774845_147774916@14.34.21,t
agtggttagtactctgcgttg

SEQ ID NO: 2147 - DNA, 22 bp, homo sapiens
  tDNA111_HisGTG_1_-_147774845_147774916@14.35.22,t
agtggttagtactctgcgttgt

SEQ ID NO: 2148 - DNA, 23 bp, homo sapiens
  tDNA111_HisGTG_1_-_147774845_147774916@14.36.23,t
agtggttagtactctgcgttgtg

SEQ ID NO: 2149 - DNA, 24 bp, homo sapiens
  tDNA111_HisGTG_1_-_147774845_147774916@14.37.24,t
agtggttagtactctgcgttgtgg

SEQ ID NO: 2150 - DNA, 25 bp, homo sapiens
  tDNA111_HisGTG_1_-_147774845_147774916@14.38.25,t
agtggttagtactctgcgttgtggc

SEQ ID NO: 2151 - DNA, 26 bp, homo sapiens
  tDNA111_HisGTG_1_-_147774845_147774916@14.39.26,t
agtggttagtactctgcgttgtggcc

SEQ ID NO: 2152 - DNA, 19 bp, homo sapiens
  tDNA136_ValAAC_6_-_27648885_27648957@14.32.19,trn
agtggttatcacgttcgcc

SEQ ID NO: 2153 - DNA, 20 bp, homo sapiens
  tDNAMT_ProTGG_MT_-_15956_16023@48.67.20
agttaaagactttttctctg

SEQ ID NO: 2154 - DNA, 21 bp, homo sapiens
  tDNAMT_ProTGG_MT_-_15956_16023@48.68.21
agttaaagactttttctctga

SEQ ID NO: 2155 - DNA, 22 bp, homo sapiens
  tDNAMT_ProTGG_MT_-_15956_16023@48.69.22
agttaaagactttttctctgac

SEQ ID NO: 2156 - DNA, 23 bp, homo sapiens
  tDNAMT_ProTGG_MT_-_15956_16023@48.70.23
agttaaagactttttctctgacc

SEQ ID NO: 2157 - DNA, 24 bp, homo sapiens
  tDNAMT_ProTGG_MT_-_15956_16023@48.71.24
agttaaagactttttctctgacca

SEQ ID NO: 2158 - DNA, 25 bp, homo sapiens
  tDNA42_GlnCTG_6_+_27263212_27263283@51.75.25,tDNA
agttcaaatctcggtggaacctcca

SEQ ID NO: 2159 - DNA, 25 bp, homo sapiens
  tDNA112_GlnCTG_1_-_147737382_147737453@51.75.25,t
agttcgagtctcggtggaacctcca

SEQ ID NO: 2160 - DNA, 23 bp, homo sapiens
  tDNA14_TyrGTA_6_+_26569086_26569176@14.36.23,tDNA
agttggtagagcggaggactgta

SEQ ID NO: 2161 - DNA, 24 bp, homo sapiens
  tDNA14_TyrGTA_6_+_26569086_26569176@14.37.24,tDNA
agttggtagagcggaggactgtag

SEQ ID NO: 2162 - DNA, 24 bp, homo sapiens
  tDNAMT_LeuTAG_MT_+_12266_12336@12.35.24
ataacagctatccattggtcttag

SEQ ID NO: 2163 - DNA, 26 bp, homo sapiens
  tDNAMT_LeuTAG_MT_+_12266_12336@12.37.26
ataacagctatccattggtcttaggc

SEQ ID NO: 2164 - DNA, 18 bp, homo sapiens
  tDNA61_MetCAT_6_+_27745664_27745735@34.51.18,tDNA
ataacccagaggtcgatg

SEQ ID NO: 2165 - DNA, 19 bp, homo sapiens
  tDNA61_MetCAT_6_+_27745664_27745735@34.52.19,tDNA
ataacccagaggtcgatgg

SEQ ID NO: 2166 - DNA, 20 bp, homo sapiens
  tDNA61_MetCAT_6_+_27745664_27745735@34.53.20,tDNA
ataacccagaggtcgatgga

SEQ ID NO: 2167 - DNA, 21 bp, homo sapiens
  tDNA61_MetCAT_6_+_27745664_27745735@34.54.21,tDNA
ataacccagaggtcgatggat

SEQ ID NO: 2168 - DNA, 22 bp, homo sapiens
  tDNA61_MetCAT_6_+_27745664_27745735@34.55.22,tDNA
ataacccagaggtcgatggatc

SEQ ID NO: 2169 - DNA, 23 bp, homo sapiens
  tDNA32_MetCAT_1_+_153643726_153643797@34.56.23,tr
ataacccagaggtcgatggatcg

SEQ ID NO: 2170 - DNA, 24 bp, homo sapiens
  tDNA32_MetCAT_1_+_153643726_153643797@34.57.24,tr
ataacccagaggtcgatggatcga

SEQ ID NO: 2171 - DNA, 26 bp, homo sapiens
  tDNA32_MetCAT_1_+_153643726_153643797@34.59.26,tr
ataacccagaggtcgatggatcgaaa

SEQ ID NO: 2172 - DNA, 20 bp, homo sapiens
  tDNA57_IleAAT_6_+_27636362_27636435@36.55.20,tDNA
ataacgccaaggtcgcgggt

SEQ ID NO: 2173 - DNA, 18 bp, homo sapiens
  tDNAMT_IleGAT_MT_+_4263_4331@40.57.18
ataataggagcttaaacc

SEQ ID NO: 2174 - DNA, 17 bp, homo sapiens
  tDNAMT_ArgTCG_MT_+_10405_10469@49.65.17
ataatcatatttaccaa

SEQ ID NO: 2175 - DNA, 20 bp, homo sapiens
  tDNAMT_ArgTCG_MT_+_10405_10469@49.68.20
ataatcatatttaccaacca

SEQ ID NO: 2176 - DNA, 20 bp, homo sapiens
  tDNA21_MetCAT_6_+_26701712_26701784@35.54.20,tDNA
ataatctgaaggtcctgagt

SEQ ID NO: 2177 - DNA, 20 bp, homo sapiens
  tDNA29_IleTAT_6_+_26988125_26988218@36.55.20,tDNA
ataatgccgaggttgtgagt

SEQ ID NO: 2178 - DNA, 21 bp, homo sapiens
  tDNA29_IleTAT_6_+_26988125_26988218@36.56.21,tDNA
ataatgccgaggttgtgagtt

SEQ ID NO: 2179 - DNA, 22 bp, homo sapiens
  tDNA29_IleTAT_6_+_26988125_26988218@36.57.22,tDNA
ataatgccgaggttgtgagttc

SEQ ID NO: 2180 - DNA, 19 bp, homo sapiens
  tDNAMT_MetCAT_MT_+_4402_4469@52.70.19
atacccttcccgtactacc

SEQ ID NO: 2181 - DNA, 20 bp, homo sapiens
  tDNAMT_MetCAT_MT_+_4402_4469@52.71.20
atacccttcccgtactacca

SEQ ID NO: 2182 - DNA, 17 bp, homo sapiens
  tDNAMT_TrpTCA_MT_+_5512_5579@55.71.17,tDNAlookali
atacttaatttctgcca

SEQ ID NO: 2183 - DNA, 26 bp, homo sapiens
  tDNA28_CysGCA_17_-_37025545_37025616@7.32.26,tDNA
atagctcagtggtagagcatttgact

SEQ ID NO: 2184 - DNA, 28 bp, homo sapiens
  tDNA28_CysGCA_17_-_37025545_37025616@7.34.28,tDNA
atagctcagtggtagagcatttgactgc

SEQ ID NO: 2185 - DNA, 20 bp, homo sapiens
  tDNA106_HisGTG_1_-_149155828_149155899@12.31.20,t
atagtggttagtactctgcg

SEQ ID NO: 2186 - DNA, 21 bp, homo sapiens
  tDNA111_HisGTG_1_-_147774845_147774916@12.32.21,t
atagtggttagtactctgcgt

SEQ ID NO: 2187 - DNA, 22 bp, homo sapiens
  tDNA111_HisGTG_1_-_147774845_147774916@12.33.22,t
atagtggttagtactctgcgtt

SEQ ID NO: 2188 - DNA, 23 bp, homo sapiens
  tDNA111_HisGTG_1_-_147774845_147774916@12.34.23,t
atagtggttagtactctgcgttg

SEQ ID NO: 2189 - DNA, 27 bp, homo sapiens
  tDNA111_HisGTG_1_-_147774845_147774916@12.38.27,t
atagtggttagtactctgcgttgtggc

SEQ ID NO: 2190 - DNA, 16 bp, homo sapiens
  tDNAMT_GluTTC_MT_-_14674_14742@34.49.16,tDNAlooka
atatcattggtcgtgg

SEQ ID NO: 2191 - DNA, 21 bp, homo sapiens
  tDNAMT_GluTTC_MT_-_14674_14742@34.54.21,tDNAlooka
atatcattggtcgtggttgta

SEQ ID NO: 2192 - DNA, 22 bp, homo sapiens
  tDNAMT_GluTTC_MT_-_14674_14742@34.55.22,tDNAlooka
atatcattggtcgtggttgtag

SEQ ID NO: 2193 - DNA, 23 bp, homo sapiens
  tDNAMT_GluTTC_MT_-_14674_14742@34.56.23,tDNAlooka
atatcattggtcgtggttgtagt

SEQ ID NO: 2194 - DNA, 24 bp, homo sapiens
  tDNAMT_GluTTC_MT_-_14674_14742@34.57.24,tDNAlooka
atatcattggtcgtggttgtagtc

SEQ ID NO: 2195 - DNA, 25 bp, homo sapiens
  tDNAMT_GluTTC_MT_-_14674_14742@34.58.25,tDNAlooka
atatcattggtcgtggttgtagtcc

SEQ ID NO: 2196 - DNA, 26 bp, homo sapiens
  tDNAMT_GluTTC_MT_-_14674_14742@34.59.26,tDNAlooka
atatcattggtcgtggttgtagtccg

SEQ ID NO: 2197 - DNA, 28 bp, homo sapiens
  tDNAMT_GluTTC_MT_-_14674_14742@34.61.28,tDNAlooka
atatcattggtcgtggttgtagtccgtg

SEQ ID NO: 2198 - DNA, 29 bp, homo sapiens
  tDNAMT_GluTTC_MT_-_14674_14742@34.62.29,tDNAlooka
atatcattggtcgtggttgtagtccgtgc

SEQ ID NO: 2199 - DNA, 30 bp, homo sapiens
  tDNAMT_GluTTC_MT_-_14674_14742@34.63.30,tDNAlooka
atatcattggtcgtggttgtagtccgtgcg

SEQ ID NO: 2200 - DNA, 26 bp, homo sapiens
  tDNA5_GluTTC_13_-_41634874_41634945@5.30.26,tDNA2
atatggtctagcggttaggattcctg

SEQ ID NO: 2201 - DNA, 27 bp, homo sapiens
  tDNA5_GluTTC_13_-_41634874_41634945@5.31.27,tDNA2
atatggtctagcggttaggattcctgg

SEQ ID NO: 2202 - DNA, 18 bp, homo sapiens
  tDNAMT_PheGAA_MT_+_577_647@57.74.18
atcaccccataaacacca

SEQ ID NO: 2203 - DNA, 17 bp, homo sapiens
  tDNA1_TrpCCA_7_+_99067307_99067378@58.74.17,tDNA6
atcacgtcggggtcacc

SEQ ID NO: 2204 - DNA, 18 bp, homo sapiens
  tDNA1_TrpCCA_7_+_99067307_99067378@58.75.18,tDNA6
atcacgtcggggtcacca

SEQ ID NO: 2205 - DNA, 17 bp, homo sapiens
  tDNAMT_ArgTCG_MT_+_10405_10469@52.68.17
atcatatttaccaacca

SEQ ID NO: 2206 - DNA, 18 bp, homo sapiens
  tDNAMT_GluTTC_MT_-_14674_14742@36.53.18,tDNAlooka
atcattggtcgtggttgt

SEQ ID NO: 2207 - DNA, 19 bp, homo sapiens
  tDNAMT_GluTTC_MT_-_14674_14742@36.54.19,tDNAlooka
atcattggtcgtggttgta

SEQ ID NO: 2208 - DNA, 20 bp, homo sapiens
  tDNAMT_GluTTC_MT_-_14674_14742@36.55.20,tDNAlooka
atcattggtcgtggttgtag

SEQ ID NO: 2209 - DNA, 21 bp, homo sapiens
  tDNAMT_GluTTC_MT_-_14674_14742@36.56.21,tDNAlooka
atcattggtcgtggttgtagt

SEQ ID NO: 2210 - DNA, 22 bp, homo sapiens
  tDNAMT_GluTTC_MT_-_14674_14742@36.57.22,tDNAlooka
atcattggtcgtggttgtagtc

SEQ ID NO: 2211 - DNA, 23 bp, homo sapiens
  tDNAMT_GluTTC_MT_-_14674_14742@36.58.23,tDNAlooka
atcattggtcgtggttgtagtcc

SEQ ID NO: 2212 - DNA, 24 bp, homo sapiens
  tDNAMT_GluTTC_MT_-_14674_14742@36.59.24,tDNAlooka
atcattggtcgtggttgtagtccg

SEQ ID NO: 2213 - DNA, 25 bp, homo sapiens
  tDNAMT_GluTTC_MT_-_14674_14742@36.60.25,tDNAlooka
atcattggtcgtggttgtagtccgt

SEQ ID NO: 2214 - DNA, 26 bp, homo sapiens
  tDNAMT_GluTTC_MT_-_14674_14742@36.61.26,tDNAlooka
atcattggtcgtggttgtagtccgtg

SEQ ID NO: 2215 - DNA, 27 bp, homo sapiens
  tDNAMT_GluTTC_MT_-_14674_14742@36.62.27,tDNAlooka
atcattggtcgtggttgtagtccgtgc

SEQ ID NO: 2216 - DNA, 28 bp, homo sapiens
  tDNAMT_GluTTC_MT_-_14674_14742@36.63.28,tDNAlooka
atcattggtcgtggttgtagtccgtgcg

SEQ ID NO: 2217 - DNA, 29 bp, homo sapiens
  tDNAMT_GluTTC_MT_-_14674_14742@36.64.29,tDNAlooka
atcattggtcgtggttgtagtccgtgcga

SEQ ID NO: 2218 - DNA, 30 bp, homo sapiens
  tDNAMT_GluTTC_MT_-_14674_14742@36.65.30,tDNAlooka
atcattggtcgtggttgtagtccgtgcgag

SEQ ID NO: 2219 - DNA, 22 bp, homo sapiens
  tDNA131_GlnCTG_6_-_27759135_27759206@38.59.22,trn
atccagcgatccgagttcaaat

SEQ ID NO: 2220 - DNA, 18 bp, homo sapiens
  tDNAMT_LeuTAG_MT_+_12266_12336@21.38.18
atccattggtcttaggcc

SEQ ID NO: 2221 - DNA, 19 bp, homo sapiens
  tDNAMT_LeuTAG_MT_+_12266_12336@21.39.19
atccattggtcttaggccc

SEQ ID NO: 2222 - DNA, 20 bp, homo sapiens
  tDNAMT_LeuTAG_MT_+_12266_12336@21.40.20
atccattggtcttaggcccc

SEQ ID NO: 2223 - DNA, 18 bp, homo sapiens
  tDNA2_LeuTAG_14_+_21093529_21093610@68.85.18
atcccaccactgccacca

SEQ ID NO: 2224 - DNA, 18 bp, homo sapiens
  tDNA4_ArgTCT_17_+_8024243_8024330@59.76.18
atcccaccagagtcgcca

SEQ ID NO: 2225 - DNA, 17 bp, homo sapiens
  tDNA31_SerGCT_6_+_27065085_27065166@68.84.17
atcccaccctcgtcgcc

SEQ ID NO: 2226 - DNA, 18 bp, homo sapiens
  tDNA31_SerGCT_6_+_27065085_27065166@68.85.18
atcccaccctcgtcgcca

SEQ ID NO: 2227 - DNA, 17 bp, homo sapiens
  tDNA126_LeuAAG_6_-_28446400_28446481@68.84.17,trn
atcccaccgctgccacc

SEQ ID NO: 2228 - DNA, 18 bp, homo sapiens
  tDNA126_LeuAAG_6_-_28446400_28446481@68.85.18,trn
atcccaccgctgccacca

SEQ ID NO: 2229 - DNA, 18 bp, homo sapiens
  tDNA43_SerGCT_6_+_27265775_27265856@68.85.18
atcccaccttcgtcgcca

SEQ ID NO: 2230 - DNA, 16 bp, homo sapiens
  tDNA34_LeuCAG_1_+_161411323_161411405@69.84.16,tr
atcccactcctgacac

SEQ ID NO: 2231 - DNA, 17 bp, homo sapiens
  tDNA34_LeuCAG_1_+_161411323_161411405@69.85.17,tr
atcccactcctgacacc

SEQ ID NO: 2232 - DNA, 18 bp, homo sapiens
  tDNA34_LeuCAG_1_+_161411323_161411405@69.86.18,tr
atcccactcctgacacca

SEQ ID NO: 2233 - DNA, 17 bp, homo sapiens
  tDNA17_LeuCAG_16_+_57333863_57333945@69.85.17,trn
atcccacttctgacacc

SEQ ID NO: 2234 - DNA, 18 bp, homo sapiens
  tDNA17_LeuCAG_16_+_57333863_57333945@69.86.18,trn
atcccacttctgacacca

SEQ ID NO: 2235 - DNA, 18 bp, homo sapiens
  tDNA34_ThrAGT_6_+_27130050_27130123@60.77.18,tDNA
atcccagcggggcctcca

SEQ ID NO: 2236 - DNA, 18 bp, homo sapiens
  tDNA40_ThrAGT_17_-_8042770_8042843@60.77.18,tDNA3
atcccagcggtgcctcca

SEQ ID NO: 2237 - DNA, 18 bp, homo sapiens
  tDNA127_ThrTGT_6_-_28442329_28442402@60.77.18
atcccagtagagcctcca

SEQ ID NO: 2238 - DNA, 17 bp, homo sapiens
  tDNA175_SerGCT_6_-_26305718_26305801@70.86.17,trn
atcccatcctcgtcgcc

SEQ ID NO: 2239 - DNA, 18 bp, homo sapiens
  tDNA175_SerGCT_6_-_26305718_26305801@70.87.18,trn
atcccatcctcgtcgcca

SEQ ID NO: 2240 - DNA, 19 bp, homo sapiens
  tDNA120_AlaAGC_6_-_28626014_28626085@57.75.19
atccccagcatctccacca

SEQ ID NO: 2241 - DNA, 19 bp, homo sapiens
  tDNA108_AlaAGC_6_-_28763741_28763812@57.75.19
atccccagtacctccacca

SEQ ID NO: 2242 - DNA, 27 bp, homo sapiens
  tDNA69_AspGTC_1_-_161440205_161440276@24.50.27,tr
atccccgcctgtcacgcgggagaccgg

SEQ ID NO: 2243 - DNA, 18 bp, homo sapiens
  tDNA65_AlaAGC_6_+_28574933_28575004@57.74.18,tDNA
atccccggcacctccacc

SEQ ID NO: 2244 - DNA, 19 bp, homo sapiens
  tDNA65_AlaAGC_6_+_28574933_28575004@57.75.19,tDNA
atccccggcacctccacca

SEQ ID NO: 2245 - DNA, 19 bp, homo sapiens
  tDNA13_AlaCGC_2_+_157257281_157257352@57.75.19,tr
atccccggcatctccacca

SEQ ID NO: 2246 - DNA, 18 bp, homo sapiens
  tDNA65_ProAGG_1_-_167684725_167684796@58.75.18,tr
atcccggacgagccccca

SEQ ID NO: 2247 - DNA, 19 bp, homo sapiens
  tDNA103_PheGAA_6_-_28791093_28791166@59.77.19,trn
atcccgggtttcggcacca

SEQ ID NO: 2248 - DNA, 18 bp, homo sapiens
  tDNA4_ArgTCG_6_+_26323046_26323118@59.76.18
atccctccgtggttacca

SEQ ID NO: 2249 - DNA, 18 bp, homo sapiens
  tDNA106_HisGTG_1_-_149155828_149155899@58.75.18,t
atccgagtcacggcacca

SEQ ID NO: 2250 - DNA, 17 bp, homo sapiens
  tDNA14_TyrGTA_6_+_26569086_26569176@59.75.17,tDNA
atccggctcgaaggacc

SEQ ID NO: 2251 - DNA, 18 bp, homo sapiens
  tDNA14_TyrGTA_6_+_26569086_26569176@59.76.18,tDNA
atccggctcgaaggacca

SEQ ID NO: 2252 - DNA, 18 bp, homo sapiens
  tDNA16_TyrGTA_6_+_26577332_26577420@59.76.18,tDNA
atccggctcggaggacca

SEQ ID NO: 2253 - DNA, 18 bp, homo sapiens
  tDNA29_CysGCA_17_-_37017937_37018008@58.75.18,trn
atccgggtgccccctcca

SEQ ID NO: 2254 - DNA, 18 bp, homo sapiens
  tDNAMT_AspGTC_MT_+_7518_7585@54.71.18
atcctatatatcttacca

SEQ ID NO: 2255 - DNA, 17 bp, homo sapiens
  tDNA145_SerAGA_6_-_27521192_27521273@68.84.17,trn
atcctgccgactacgcc

SEQ ID NO: 2256 - DNA, 18 bp, homo sapiens
  tDNA145_SerAGA_6_-_27521192_27521273@68.85.18,trn
atcctgccgactacgcca

SEQ ID NO: 2257 - DNA, 18 bp, homo sapiens
  tDNA137_SerCGA_6_-_27640229_27640310@68.85.18,trn
atcctgctcacagcgcca

SEQ ID NO: 2258 - DNA, 18 bp, homo sapiens
  tDNA2_SerCGA_12_+_56584148_56584229@68.85.18
atcctgttcgtgacgcca

SEQ ID NO: 2259 - DNA, 23 bp, homo sapiens
  tDNA32_MetCAT_1_+_153643726_153643797@53.75.23,tr
atcgaaaccatcctctgctacca

SEQ ID NO: 2260 - DNA, 23 bp, homo sapiens
  tDNA106_HisGTG_1_-_149155828_149155899@7.29.23,tr
atcgtatagtggttagtactctg

SEQ ID NO: 2261 - DNA, 24 bp, homo sapiens
  tDNA106_HisGTG_1_-_149155828_149155899@7.30.24,tr
atcgtatagtggttagtactctgc

SEQ ID NO: 2262 - DNA, 19 bp, homo sapiens
  tDNA72_PheGAA_6_+_28732164_28732236@38.56.19,tDNA
atctaaaggtccctggttc

SEQ ID NO: 2263 - DNA, 22 bp, homo sapiens
  tDNA72_PheGAA_6_+_28732164_28732236@38.59.22,tDNA
atctaaaggtccctggttcgat

SEQ ID NO: 2264 - DNA, 18 bp, homo sapiens
  tDNA13_ThrTGT_5_-_180618687_180618758@58.75.18,tr
atctcgctggggcctcca

SEQ ID NO: 2265 - DNA, 18 bp, homo sapiens
  tDNA42_GlnCTG_6_+_27263212_27263283@58.75.18,tDNA
atctcggtggaacctcca

SEQ ID NO: 2266 - DNA, 18 bp, homo sapiens
  tDNA130_GlnTTG_6_-_27763640_27763711@58.75.18,trn
atctcggtgggacctcca

SEQ ID NO: 2267 - DNA, 26 bp, homo sapiens
  tDNAMT_ThrTGT_MT_+_15888_15953@44.69.26
atgaaaacctttttccaaggacacca

SEQ ID NO: 2268 - DNA, 23 bp, homo sapiens
  tDNAMT_ArgTCG_MT_+_10405_10469@46.68.23
atgataatcatatttaccaacca

SEQ ID NO: 2269 - DNA, 18 bp, homo sapiens
  tDNA12_ProTGG_11_-_75946869_75946940@20.37.18
atgattctcggtttgggt

SEQ ID NO: 2270 - DNA, 18 bp, homo sapiens
  tDNAMT_SerGCT_MT_+_12207_12265@28.45.18
atgcccccatgtctaaca

SEQ ID NO: 2271 - DNA, 25 bp, homo sapiens
  tDNAMT_SerGCT_MT_+_12207_12265@28.52.25
atgcccccatgtctaacaacatggc

SEQ ID NO: 2272 - DNA, 30 bp, homo sapiens
  tDNAMT_SerGCT_MT_+_12207_12265@28.57.30
atgcccccatgtctaacaacatggctttct

SEQ ID NO: 2273 - DNA, 21 bp, homo sapiens
  tDNA11_ArgACG_3_-_45730491_45730563@15.35.21,tDNA
atggataacgcgtctgactac

SEQ ID NO: 2274 - DNA, 22 bp, homo sapiens
  tDNA11_ArgACG_3_-_45730491_45730563@15.36.22,tDNA
atggataacgcgtctgactacg

SEQ ID NO: 2275 - DNA, 23 bp, homo sapiens
  tDNA11_ArgACG_3_-_45730491_45730563@15.37.23,tDNA
atggataacgcgtctgactacgg

SEQ ID NO: 2276 - DNA, 24 bp, homo sapiens
  tDNA11_ArgACG_3_-_45730491_45730563@15.38.24,tDNA
atggataacgcgtctgactacgga

SEQ ID NO: 2277 - DNA, 17 bp, homo sapiens
  tDNA1_ArgCCG_16_+_3200675_3200747@15.31.17,tDNA11
atggataaggcgtctga

SEQ ID NO: 2278 - DNA, 25 bp, homo sapiens
  tDNA2_ArgTCG_9_+_112960803_112960875@15.39.25,trn
atggataaggcgtctgacttcggat

SEQ ID NO: 2279 - DNA, 27 bp, homo sapiens
  tDNA32_MetCAT_1_+_153643726_153643797@49.75.27,tr
atggatcgaaaccatcctctgctacca

SEQ ID NO: 2280 - DNA, 22 bp, homo sapiens
  tDNAMT_TyrGTA_MT_-_5826_5891@7.28.22
atggctgagtgaagcattggac

SEQ ID NO: 2281 - DNA, 23 bp, homo sapiens
  tDNAMT_TyrGTA_MT_-_5826_5891@7.29.23
atggctgagtgaagcattggact

SEQ ID NO: 2282 - DNA, 24 bp, homo sapiens
  tDNAMT_TyrGTA_MT_-_5826_5891@7.30.24
atggctgagtgaagcattggactg

SEQ ID NO: 2283 - DNA, 25 bp, homo sapiens
  tDNAMT_TyrGTA_MT_-_5826_5891@7.31.25
atggctgagtgaagcattggactgt

SEQ ID NO: 2284 - DNA, 26 bp, homo sapiens
  tDNAMT_TyrGTA_MT_-_5826_5891@7.32.26
atggctgagtgaagcattggactgta

SEQ ID NO: 2285 - DNA, 27 bp, homo sapiens
  tDNAMT_TyrGTA_MT_-_5826_5891@7.33.27
atggctgagtgaagcattggactgtaa

SEQ ID NO: 2286 - DNA, 28 bp, homo sapiens
  tDNAMT_TyrGTA_MT_-_5826_5891@7.34.28
atggctgagtgaagcattggactgtaaa

SEQ ID NO: 2287 - DNA, 21 bp, homo sapiens
  tDNA35_GlyGCC_1_+_161413094_161413164@3.23.21,trn
atgggtggttcagtggtagaa

SEQ ID NO: 2288 - DNA, 22 bp, homo sapiens
  tDNA35_GlyGCC_1_+_161413094_161413164@3.24.22,trn
atgggtggttcagtggtagaat

SEQ ID NO: 2289 - DNA, 28 bp, homo sapiens
  tDNA35_GlyGCC_1_+_161413094_161413164@3.30.28,trn
atgggtggttcagtggtagaattctcgc

SEQ ID NO: 2290 - DNA, 24 bp, homo sapiens
  tDNA3_GluTTC_13_-_45492062_45492133@7.30.24,tDNA1
atggtctagcggttaggattcctg

SEQ ID NO: 2291 - DNA, 25 bp, homo sapiens
  tDNA3_GluTTC_13_-_45492062_45492133@7.31.25,tDNA1
atggtctagcggttaggattcctgg

SEQ ID NO: 2292 - DNA, 16 bp, homo sapiens
  tDNA15_GlnCTG_1_+_145963304_145963375@15.30.16,tr
atggtgagcactctgg

SEQ ID NO: 2293 - DNA, 17 bp, homo sapiens
  tDNA15_GlnCTG_1_+_145963304_145963375@15.31.17,tr
atggtgagcactctgga

SEQ ID NO: 2294 - DNA, 18 bp, homo sapiens
  tDNA15_GlnCTG_1_+_145963304_145963375@15.32.18,tr
atggtgagcactctggac

SEQ ID NO: 2295 - DNA, 19 bp, homo sapiens
  tDNA15_GlnCTG_1_+_145963304_145963375@15.33.19,tr
atggtgagcactctggact

SEQ ID NO: 2296 - DNA, 20 bp, homo sapiens
  tDNA15_GlnCTG_1_+_145963304_145963375@15.34.20,tr
atggtgagcactctggactc

SEQ ID NO: 2297 - DNA, 28 bp, homo sapiens
  tDNA15_GlnCTG_1_+_145963304_145963375@15.42.28,tr
atggtgagcactctggactctgaatcca

SEQ ID NO: 2298 - DNA, 29 bp, homo sapiens
  tDNAMT_ProTGG_MT_-_15956_16023@41.69.29
atggtggagttaaagactttttctctgac

SEQ ID NO: 2299 - DNA, 24 bp, homo sapiens
  tDNA42_GlnCTG_6_+_27263212_27263283@7.30.24,tDNA1
atggtgtaatggttagcactctgg

SEQ ID NO: 2300 - DNA, 25 bp, homo sapiens
  tDNA42_GlnCTG_6_+_27263212_27263283@7.31.25,tDNA1
atggtgtaatggttagcactctgga

SEQ ID NO: 2301 - DNA, 27 bp, homo sapiens
  tDNA42_GlnCTG_6_+_27263212_27263283@7.33.27,tDNA1
atggtgtaatggttagcactctggact

SEQ ID NO: 2302 - DNA, 28 bp, homo sapiens
  tDNA42_GlnCTG_6_+_27263212_27263283@7.34.28,tDNA1
atggtgtaatggttagcactctggactc

SEQ ID NO: 2303 - DNA, 16 bp, homo sapiens
  tDNA42_GlnCTG_6_+_27263212_27263283@15.30.16,tDNA
atggttagcactctgg

SEQ ID NO: 2304 - DNA, 17 bp, homo sapiens
  tDNA42_GlnCTG_6_+_27263212_27263283@15.31.17,tDNA
atggttagcactctgga

SEQ ID NO: 2305 - DNA, 18 bp, homo sapiens
  tDNA42_GlnCTG_6_+_27263212_27263283@15.32.18,tDNA
atggttagcactctggac

SEQ ID NO: 2306 - DNA, 19 bp, homo sapiens
  tDNA42_GlnCTG_6_+_27263212_27263283@15.33.19,tDNA
atggttagcactctggact

SEQ ID NO: 2307 - DNA, 20 bp, homo sapiens
  tDNA42_GlnCTG_6_+_27263212_27263283@15.34.20,tDNA
atggttagcactctggactc

SEQ ID NO: 2308 - DNA, 21 bp, homo sapiens
  tDNA42_GlnCTG_6_+_27263212_27263283@15.35.21,tDNA
atggttagcactctggactct

SEQ ID NO: 2309 - DNA, 22 bp, homo sapiens
  tDNA42_GlnCTG_6_+_27263212_27263283@15.36.22,tDNA
atggttagcactctggactctg

SEQ ID NO: 2310 - DNA, 23 bp, homo sapiens
  tDNA42_GlnCTG_6_+_27263212_27263283@15.37.23,tDNA
atggttagcactctggactctga

SEQ ID NO: 2311 - DNA, 24 bp, homo sapiens
  tDNA42_GlnCTG_6_+_27263212_27263283@15.38.24,tDNA
atggttagcactctggactctgaa

SEQ ID NO: 2312 - DNA, 25 bp, homo sapiens
  tDNA42_GlnCTG_6_+_27263212_27263283@15.39.25,tDNA
atggttagcactctggactctgaat

SEQ ID NO: 2313 - DNA, 26 bp, homo sapiens
  tDNA42_GlnCTG_6_+_27263212_27263283@15.40.26,tDNA
atggttagcactctggactctgaatc

SEQ ID NO: 2314 - DNA, 27 bp, homo sapiens
  tDNA42_GlnCTG_6_+_27263212_27263283@15.41.27,tDNA
atggttagcactctggactctgaatcc

SEQ ID NO: 2315 - DNA, 28 bp, homo sapiens
  tDNA146_GlnCTG_6_-_27515531_27515602@15.42.28,trn
atggttagcactctggactctgaatcca

SEQ ID NO: 2316 - DNA, 30 bp, homo sapiens
  tDNA146_GlnCTG_6_-_27515531_27515602@15.44.30,trn
atggttagcactctggactctgaatccagc

SEQ ID NO: 2317 - DNA, 20 bp, homo sapiens
  tDNA130_GlnTTG_6_-_27763640_27763711@15.34.20,trn
atggttagcactctggactt

SEQ ID NO: 2318 - DNA, 21 bp, homo sapiens
  tDNA130_GlnTTG_6_-_27763640_27763711@15.35.21,trn
atggttagcactctggacttt

SEQ ID NO: 2319 - DNA, 22 bp, homo sapiens
  tDNA130_GlnTTG_6_-_27763640_27763711@15.36.22,trn
atggttagcactctggactttg

SEQ ID NO: 2320 - DNA, 23 bp, homo sapiens
  tDNA130_GlnTTG_6_-_27763640_27763711@15.37.23,trn
atggttagcactctggactttga

SEQ ID NO: 2321 - DNA, 24 bp, homo sapiens
  tDNA130_GlnTTG_6_-_27763640_27763711@15.38.24,trn
atggttagcactctggactttgaa

SEQ ID NO: 2322 - DNA, 25 bp, homo sapiens
  tDNA130_GlnTTG_6_-_27763640_27763711@15.39.25,trn
atggttagcactctggactttgaat

SEQ ID NO: 2323 - DNA, 26 bp, homo sapiens
  tDNA130_GlnTTG_6_-_27763640_27763711@15.40.26,trn
atggttagcactctggactttgaatc

SEQ ID NO: 2324 - DNA, 30 bp, homo sapiens
  tDNAMT_GluTTC_MT_-_14674_14742@24.53.30,tDNAlooka
atggtttttcatatcattggtcgtggttgt

SEQ ID NO: 2325 - DNA, 27 bp, homo sapiens
  tDNAMT_SerGCT_MT_+_12207_12265@36.62.27
atgtctaacaacatggctttctcacca

SEQ ID NO: 2326 - DNA, 28 bp, homo sapiens
  tDNAMT_MetCAT_MT_+_4402_4469@43.70.28
atgttggttatacccttcccgtactacc

SEQ ID NO: 2327 - DNA, 29 bp, homo sapiens
  tDNAMT_MetCAT_MT_+_4402_4469@43.71.29
atgttggttatacccttcccgtactacca

SEQ ID NO: 2328 - DNA, 16 bp, homo sapiens
  tDNAMT_PheGAA_MT_+_577_647@39.54.16
atgtttagacgggctc

SEQ ID NO: 2329 - DNA, 17 bp, homo sapiens
  tDNAMT_PheGAA_MT_+_577_647@39.55.17
atgtttagacgggctca

SEQ ID NO: 2330 - DNA, 18 bp, homo sapiens
  tDNAMT_PheGAA_MT_+_577_647@39.56.18
atgtttagacgggctcac

SEQ ID NO: 2331 - DNA, 19 bp, homo sapiens
  tDNAMT_PheGAA_MT_+_577_647@39.57.19
atgtttagacgggctcaca

SEQ ID NO: 2332 - DNA, 22 bp, homo sapiens
  tDNAMT_PheGAA_MT_+_577_647@39.60.22
atgtttagacgggctcacatca

SEQ ID NO: 2333 - DNA, 23 bp, homo sapiens
  tDNAMT_PheGAA_MT_+_577_647@39.61.23
atgtttagacgggctcacatcac

SEQ ID NO: 2334 - DNA, 24 bp, homo sapiens
  tDNAMT_PheGAA_MT_+_577_647@39.62.24
atgtttagacgggctcacatcacc

SEQ ID NO: 2335 - DNA, 25 bp, homo sapiens
  tDNAMT_PheGAA_MT_+_577_647@39.63.25
atgtttagacgggctcacatcaccc

SEQ ID NO: 2336 - DNA, 26 bp, homo sapiens
  tDNAMT_PheGAA_MT_+_577_647@39.64.26
atgtttagacgggctcacatcacccc

SEQ ID NO: 2337 - DNA, 27 bp, homo sapiens
  tDNAMT_PheGAA_MT_+_577_647@39.65.27
atgtttagacgggctcacatcacccca

SEQ ID NO: 2338 - DNA, 29 bp, homo sapiens
  tDNAMT_PheGAA_MT_+_577_647@39.67.29
atgtttagacgggctcacatcaccccata

SEQ ID NO: 2339 - DNA, 29 bp, homo sapiens
  tDNAMT_LysTTT_MT_+_8295_8364@41.69.29,tDNAlookali
attaagagaaccaacacctctttacagtg

SEQ ID NO: 2340 - DNA, 19 bp, homo sapiens
  tDNAMT_ProTGG_MT_-_15956_16023@16.34.19
attagaatcttagctttgg

SEQ ID NO: 2341 - DNA, 26 bp, homo sapiens
  tDNAMT_ArgTCG_MT_+_10405_10469@43.68.26
attatgataatcatatttaccaacca

SEQ ID NO: 2342 - DNA, 19 bp, homo sapiens
  tDNA18_TyrGTA_14_-_21125623_21125716@58.76.19
attccagctcgaaggacca

SEQ ID NO: 2343 - DNA, 20 bp, homo sapiens
  tDNA34_GlyCCC_16_-_686736_686806@30.49.20,tDNA27_
attcccattcttgcgacccg

SEQ ID NO: 2344 - DNA, 19 bp, homo sapiens
  tDNA10_GlyTCC_17_+_8124866_8124937@57.75.19,tDNA1
attcccggccaacgcacca

SEQ ID NO: 2345 - DNA, 19 bp, homo sapiens
  tDNA19_TyrGTA_14_-_21121258_21121351@58.76.19,trn
attccggctcgaaggacca

SEQ ID NO: 2346 - DNA, 19 bp, homo sapiens
  tDNA32_SerTGA_17_-_22028179_22028247@54.72.19,trn
attccttccttttttgcca

SEQ ID NO: 2347 - DNA, 19 bp, homo sapiens
  tDNAMT_GlnTTG_MT_-_4329_4400@57.75.19,tDNAlookali
attctcatagtcctagcca

SEQ ID NO: 2348 - DNA, 16 bp, homo sapiens
  tDNAMT_GluTTC_MT_-_14674_14742@39.54.16,tDNAlooka
attggtcgtggttgta

SEQ ID NO: 2349 - DNA, 17 bp, homo sapiens
  tDNAMT_GluTTC_MT_-_14674_14742@39.55.17,tDNAlooka
attggtcgtggttgtag

SEQ ID NO: 2350 - DNA, 18 bp, homo sapiens
  tDNAMT_GluTTC_MT_-_14674_14742@39.56.18,tDNAlooka
attggtcgtggttgtagt

SEQ ID NO: 2351 - DNA, 19 bp, homo sapiens
  tDNAMT_GluTTC_MT_-_14674_14742@39.57.19,tDNAlooka
attggtcgtggttgtagtc

SEQ ID NO: 2352 - DNA, 20 bp, homo sapiens
  tDNAMT_GluTTC_MT_-_14674_14742@39.58.20,tDNAlooka
attggtcgtggttgtagtcc

SEQ ID NO: 2353 - DNA, 21 bp, homo sapiens
  tDNAMT_GluTTC_MT_-_14674_14742@39.59.21,tDNAlooka
attggtcgtggttgtagtccg

SEQ ID NO: 2354 - DNA, 22 bp, homo sapiens
  tDNAMT_GluTTC_MT_-_14674_14742@39.60.22,tDNAlooka
attggtcgtggttgtagtccgt

SEQ ID NO: 2355 - DNA, 23 bp, homo sapiens
  tDNAMT_GluTTC_MT_-_14674_14742@39.61.23,tDNAlooka
attggtcgtggttgtagtccgtg

SEQ ID NO: 2356 - DNA, 24 bp, homo sapiens
  tDNAMT_GluTTC_MT_-_14674_14742@39.62.24,tDNAlooka
attggtcgtggttgtagtccgtgc

SEQ ID NO: 2357 - DNA, 25 bp, homo sapiens
  tDNAMT_GluTTC_MT_-_14674_14742@39.63.25,tDNAlooka
attggtcgtggttgtagtccgtgcg

SEQ ID NO: 2358 - DNA, 26 bp, homo sapiens
  tDNAMT_GluTTC_MT_-_14674_14742@39.64.26,tDNAlooka
attggtcgtggttgtagtccgtgcga

SEQ ID NO: 2359 - DNA, 27 bp, homo sapiens
  tDNAMT_GluTTC_MT_-_14674_14742@39.65.27,tDNAlooka
attggtcgtggttgtagtccgtgcgag

SEQ ID NO: 2360 - DNA, 28 bp, homo sapiens
  tDNAMT_GluTTC_MT_-_14674_14742@39.66.28,tDNAlooka
attggtcgtggttgtagtccgtgcgaga

SEQ ID NO: 2361 - DNA, 29 bp, homo sapiens
  tDNAMT_GluTTC_MT_-_14674_14742@39.67.29,tDNAlooka
attggtcgtggttgtagtccgtgcgagaa

SEQ ID NO: 2362 - DNA, 21 bp, homo sapiens
  tDNA133_GlyCCC_1_-_16872434_16872504@3.23.21,tDNA
attggtggttcagtggtagaa

SEQ ID NO: 2363 - DNA, 22 bp, homo sapiens
  tDNA133_GlyCCC_1_-_16872434_16872504@3.24.22,tDNA
attggtggttcagtggtagaat

SEQ ID NO: 2364 - DNA, 25 bp, homo sapiens
  tDNA133_GlyCCC_1_-_16872434_16872504@3.27.25,tDNA
attggtggttcagtggtagaattct

SEQ ID NO: 2365 - DNA, 26 bp, homo sapiens
  tDNA133_GlyCCC_1_-_16872434_16872504@3.28.26,tDNA
attggtggttcagtggtagaattctc

SEQ ID NO: 2366 - DNA, 27 bp, homo sapiens
  tDNA133_GlyCCC_1_-_16872434_16872504@3.29.27,tDNA
attggtggttcagtggtagaattctcg

SEQ ID NO: 2367 - DNA, 28 bp, homo sapiens
  tDNA133_GlyCCC_1_-_16872434_16872504@3.30.28,tDNA
attggtggttcagtggtagaattctcgc

SEQ ID NO: 2368 - DNA, 30 bp, homo sapiens
  tDNA133_GlyCCC_1_-_16872434_16872504@3.32.30,tDNA
attggtggttcagtggtagaattctcgcct

SEQ ID NO: 2369 - DNA, 17 bp, homo sapiens
  tDNAMT_HisGTG_MT_+_12138_12206@28.44.17
attgtgaatctgacaac

SEQ ID NO: 2370 - DNA, 18 bp, homo sapiens
  tDNAMT_HisGTG_MT_+_12138_12206@28.45.18
attgtgaatctgacaaca

SEQ ID NO: 2371 - DNA, 19 bp, homo sapiens
  tDNAMT_HisGTG_MT_+_12138_12206@28.46.19
attgtgaatctgacaacag

SEQ ID NO: 2372 - DNA, 20 bp, homo sapiens
  tDNAMT_HisGTG_MT_+_12138_12206@28.47.20
attgtgaatctgacaacaga

SEQ ID NO: 2373 - DNA, 21 bp, homo sapiens
  tDNAMT_HisGTG_MT_+_12138_12206@28.48.21
attgtgaatctgacaacagag

SEQ ID NO: 2374 - DNA, 22 bp, homo sapiens
  tDNAMT_HisGTG_MT_+_12138_12206@28.49.22
attgtgaatctgacaacagagg

SEQ ID NO: 2375 - DNA, 23 bp, homo sapiens
  tDNAMT_HisGTG_MT_+_12138_12206@28.50.23
attgtgaatctgacaacagaggc

SEQ ID NO: 2376 - DNA, 24 bp, homo sapiens
  tDNAMT_HisGTG_MT_+_12138_12206@28.51.24
attgtgaatctgacaacagaggct

SEQ ID NO: 2377 - DNA, 25 bp, homo sapiens
  tDNAMT_HisGTG_MT_+_12138_12206@28.52.25
attgtgaatctgacaacagaggctt

SEQ ID NO: 2378 - DNA, 26 bp, homo sapiens
  tDNAMT_HisGTG_MT_+_12138_12206@28.53.26
attgtgaatctgacaacagaggctta

SEQ ID NO: 2379 - DNA, 27 bp, homo sapiens
  tDNAMT_HisGTG_MT_+_12138_12206@28.54.27
attgtgaatctgacaacagaggcttac

SEQ ID NO: 2380 - DNA, 28 bp, homo sapiens
  tDNAMT_HisGTG_MT_+_12138_12206@28.55.28
attgtgaatctgacaacagaggcttacg

SEQ ID NO: 2381 - DNA, 30 bp, homo sapiens
  tDNAMT_HisGTG_MT_+_12138_12206@28.57.30
attgtgaatctgacaacagaggcttacgac

SEQ ID NO: 2382 - DNA, 19 bp, homo sapiens
  tDNAMT_ValTAC_MT_+_1602_1670@44.62.19
atttcaacttaacttgacc

SEQ ID NO: 2383 - DNA, 20 bp, homo sapiens
  tDNAMT_ValTAC_MT_+_1602_1670@44.63.20
atttcaacttaacttgaccg

SEQ ID NO: 2384 - DNA, 24 bp, homo sapiens
  tDNAMT_ValTAC_MT_+_1602_1670@44.67.24
atttcaacttaacttgaccgctct

SEQ ID NO: 2385 - DNA, 25 bp, homo sapiens
  tDNAMT_ValTAC_MT_+_1602_1670@44.68.25
atttcaacttaacttgaccgctctg

SEQ ID NO: 2386 - DNA, 26 bp, homo sapiens
  tDNAMT_ValTAC_MT_+_1602_1670@44.69.26
atttcaacttaacttgaccgctctga

SEQ ID NO: 2387 - DNA, 27 bp, homo sapiens
  tDNAMT_ValTAC_MT_+_1602_1670@44.70.27
atttcaacttaacttgaccgctctgac

SEQ ID NO: 2388 - DNA, 28 bp, homo sapiens
  tDNAMT_ValTAC_MT_+_1602_1670@44.71.28
atttcaacttaacttgaccgctctgacc

SEQ ID NO: 2389 - DNA, 29 bp, homo sapiens
  tDNAMT_ValTAC_MT_+_1602_1670@44.72.29
atttcaacttaacttgaccgctctgacca

SEQ ID NO: 2390 - DNA, 20 bp, homo sapiens
  tDNAMT_HisGTG_MT_+_12138_12206@17.36.20
caaaacatcagattgtgaat

SEQ ID NO: 2391 - DNA, 21 bp, homo sapiens
  tDNAMT_HisGTG_MT_+_12138_12206@17.37.21
caaaacatcagattgtgaatc

SEQ ID NO: 2392 - DNA, 26 bp, homo sapiens
  tDNAMT_HisGTG_MT_+_12138_12206@17.42.26
caaaacatcagattgtgaatctgaca

SEQ ID NO: 2393 - DNA, 29 bp, homo sapiens
  tDNAMT_HisGTG_MT_+_12138_12206@17.45.29
caaaacatcagattgtgaatctgacaaca

SEQ ID NO: 2394 - DNA, 20 bp, homo sapiens
  tDNAMT_CysGCA_MT_-_5761_5826@50.69.20
caaacctgccggggcttcca

SEQ ID NO: 2395 - DNA, 21 bp, homo sapiens
  tDNA1_TrpCCA_7_+_99067307_99067378@55.75.21,tDNA6
caaatcacgtcggggtcacca

SEQ ID NO: 2396 - DNA, 21 bp, homo sapiens
  tDNA65_ProAGG_1_-_167684725_167684796@55.75.21,tr
caaatcccggacgagccccca

SEQ ID NO: 2397 - DNA, 21 bp, homo sapiens
  tDNA13_ThrTGT_5_-_180618687_180618758@55.75.21,tr
caaatctcgctggggcctcca

SEQ ID NO: 2398 - DNA, 21 bp, homo sapiens
  tDNA42_GlnCTG_6_+_27263212_27263283@55.75.21,tDNA
caaatctcggtggaacctcca

SEQ ID NO: 2399 - DNA, 21 bp, homo sapiens
  tDNA130_GlnTTG_6_-_27763640_27763711@55.75.21,trn
caaatctcggtgggacctcca

SEQ ID NO: 2400 - DNA, 21 bp, homo sapiens
  tDNAMT_LysTTT_MT_+_8295_8364@52.72.21,tDNAlookali
caacacctctttacagtgacc

SEQ ID NO: 2401 - DNA, 22 bp, homo sapiens
  tDNAMT_LysTTT_MT_+_8295_8364@52.73.22,tDNAlookali
caacacctctttacagtgacca

SEQ ID NO: 2402 - DNA, 17 bp, homo sapiens
  tDNAMT_SerGCT_MT_+_12207_12265@44.60.17
caacatggctttctcac

SEQ ID NO: 2403 - DNA, 18 bp, homo sapiens
  tDNAMT_SerGCT_MT_+_12207_12265@44.61.18
caacatggctttctcacc

SEQ ID NO: 2404 - DNA, 19 bp, homo sapiens
  tDNAMT_SerGCT_MT_+_12207_12265@44.62.19
caacatggctttctcacca

SEQ ID NO: 2405 - DNA, 22 bp, homo sapiens
  tDNAMT_GlyTCC_MT_+_9991_10058@50.71.22
caacattcaaaaaagagtacca

SEQ ID NO: 2406 - DNA, 21 bp, homo sapiens
  tDNAMT_LeuTAG_MT_+_12266_12336@54.74.21
caactccaaataaaagtacca

SEQ ID NO: 2407 - DNA, 16 bp, homo sapiens
  tDNAMT_ValTAC_MT_+_1602_1670@48.63.16
caacttaacttgaccg

SEQ ID NO: 2408 - DNA, 19 bp, homo sapiens
  tDNAMT_ValTAC_MT_+_1602_1670@48.66.19
caacttaacttgaccgctc

SEQ ID NO: 2409 - DNA, 20 bp, homo sapiens
  tDNAMT_ValTAC_MT_+_1602_1670@48.67.20
caacttaacttgaccgctct

SEQ ID NO: 2410 - DNA, 21 bp, homo sapiens
  tDNAMT_ValTAC_MT_+_1602_1670@48.68.21
caacttaacttgaccgctctg

SEQ ID NO: 2411 - DNA, 22 bp, homo sapiens
  tDNAMT_ValTAC_MT_+_1602_1670@48.69.22
caacttaacttgaccgctctga

SEQ ID NO: 2412 - DNA, 23 bp, homo sapiens
  tDNAMT_ValTAC_MT_+_1602_1670@48.70.23
caacttaacttgaccgctctgac

SEQ ID NO: 2413 - DNA, 24 bp, homo sapiens
  tDNAMT_ValTAC_MT_+_1602_1670@48.71.24
caacttaacttgaccgctctgacc

SEQ ID NO: 2414 - DNA, 25 bp, homo sapiens
  tDNAMT_ValTAC_MT_+_1602_1670@48.72.25
caacttaacttgaccgctctgacca

SEQ ID NO: 2415 - DNA, 16 bp, homo sapiens
  tDNAMT_SerGCT_MT_+_12207_12265@12.27.16
caagaactgctaactc

SEQ ID NO: 2416 - DNA, 17 bp, homo sapiens
  tDNAMT_SerGCT_MT_+_12207_12265@12.28.17
caagaactgctaactca

SEQ ID NO: 2417 - DNA, 19 bp, homo sapiens
  tDNAMT_SerGCT_MT_+_12207_12265@12.30.19
caagaactgctaactcatg

SEQ ID NO: 2418 - DNA, 20 bp, homo sapiens
  tDNAMT_SerGCT_MT_+_12207_12265@12.31.20
caagaactgctaactcatgc

SEQ ID NO: 2419 - DNA, 21 bp, homo sapiens
  tDNAMT_SerGCT_MT_+_12207_12265@12.32.21
caagaactgctaactcatgcc

SEQ ID NO: 2420 - DNA, 22 bp, homo sapiens
  tDNAMT_SerGCT_MT_+_12207_12265@12.33.22
caagaactgctaactcatgccc

SEQ ID NO: 2421 - DNA, 23 bp, homo sapiens
  tDNAMT_SerGCT_MT_+_12207_12265@12.34.23
caagaactgctaactcatgcccc

SEQ ID NO: 2422 - DNA, 24 bp, homo sapiens
  tDNAMT_SerGCT_MT_+_12207_12265@12.35.24
caagaactgctaactcatgccccc

SEQ ID NO: 2423 - DNA, 27 bp, homo sapiens
  tDNAMT_SerGCT_MT_+_12207_12265@12.38.27
caagaactgctaactcatgcccccatg

SEQ ID NO: 2424 - DNA, 21 bp, homo sapiens
  tDNA12_TrpCCA_17_+_19411494_19411565@55.75.21
caagtcacgtcggggtcacca

SEQ ID NO: 2425 - DNA, 21 bp, homo sapiens
  tDNA5_LysTTT_11_+_59323902_59323974@56.76.21,tDNA
caagtccctgttcgggcgcca

SEQ ID NO: 2426 - DNA, 19 bp, homo sapiens
  tDNAMT_TrpTCA_MT_+_5512_5579@53.71.19,tDNAlookali
caatacttaatttctgcca

SEQ ID NO: 2427 - DNA, 20 bp, homo sapiens
  tDNA65_AlaAGC_6_+_28574933_28575004@55.74.20,tDNA
caatccccggcacctccacc

SEQ ID NO: 2428 - DNA, 21 bp, homo sapiens
  tDNA65_AlaAGC_6_+_28574933_28575004@55.75.21,tDNA
caatccccggcacctccacca

SEQ ID NO: 2429 - DNA, 21 bp, homo sapiens
  tDNA13_AlaCGC_2_+_157257281_157257352@55.75.21,tr
caatccccggcatctccacca

SEQ ID NO: 2430 - DNA, 16 bp, homo sapiens
  tDNA100_LeuCAA_6_-_28864000_28864105@49.64.16,trn
caatggaggcgtgggt

SEQ ID NO: 2431 - DNA, 16 bp, homo sapiens
  tDNAMT_SerGCT_MT_+_12207_12265@10.25.16
cacaagaactgctaac

SEQ ID NO: 2432 - DNA, 17 bp, homo sapiens
  tDNAMT_SerGCT_MT_+_12207_12265@10.26.17
cacaagaactgctaact

SEQ ID NO: 2433 - DNA, 18 bp, homo sapiens
  tDNAMT_SerGCT_MT_+_12207_12265@10.27.18
cacaagaactgctaactc

SEQ ID NO: 2434 - DNA, 19 bp, homo sapiens
  tDNAMT_SerGCT_MT_+_12207_12265@10.28.19
cacaagaactgctaactca

SEQ ID NO: 2435 - DNA, 20 bp, homo sapiens
  tDNAMT_SerGCT_MT_+_12207_12265@10.29.20
cacaagaactgctaactcat

SEQ ID NO: 2436 - DNA, 21 bp, homo sapiens
  tDNAMT_SerGCT_MT_+_12207_12265@10.30.21
cacaagaactgctaactcatg

SEQ ID NO: 2437 - DNA, 22 bp, homo sapiens
  tDNAMT_SerGCT_MT_+_12207_12265@10.31.22
cacaagaactgctaactcatgc

SEQ ID NO: 2438 - DNA, 23 bp, homo sapiens
  tDNAMT_SerGCT_MT_+_12207_12265@10.32.23
cacaagaactgctaactcatgcc

SEQ ID NO: 2439 - DNA, 24 bp, homo sapiens
  tDNAMT_SerGCT_MT_+_12207_12265@10.33.24
cacaagaactgctaactcatgccc

SEQ ID NO: 2440 - DNA, 17 bp, homo sapiens
  tDNAMT_PheGAA_MT_+_577_647@54.70.17
cacatcaccccataaac

SEQ ID NO: 2441 - DNA, 18 bp, homo sapiens
  tDNAMT_PheGAA_MT_+_577_647@54.71.18
cacatcaccccataaaca

SEQ ID NO: 2442 - DNA, 19 bp, homo sapiens
  tDNAMT_PheGAA_MT_+_577_647@54.72.19
cacatcaccccataaacac

SEQ ID NO: 2443 - DNA, 20 bp, homo sapiens
  tDNAMT_PheGAA_MT_+_577_647@54.73.20
cacatcaccccataaacacc

SEQ ID NO: 2444 - DNA, 21 bp, homo sapiens
  tDNAMT_PheGAA_MT_+_577_647@54.74.21
cacatcaccccataaacacca

SEQ ID NO: 2445 - DNA, 27 bp, homo sapiens
  tDNA3_GluTTC_13_-_45492062_45492133@4.30.27,tDNA1
cacatggtctagcggttaggattcctg

SEQ ID NO: 2446 - DNA, 28 bp, homo sapiens
  tDNA3_GluTTC_13_-_45492062_45492133@4.31.28,tDNA1
cacatggtctagcggttaggattcctgg

SEQ ID NO: 2447 - DNA, 30 bp, homo sapiens
  tDNA3_GluTTC_13_-_45492062_45492133@36.65.30,tDNA
cacccaggcggcccgggttcgactcccggt

SEQ ID NO: 2448 - DNA, 16 bp, homo sapiens
  tDNAMT_PheGAA_MT_+_577_647@59.74.16
caccccataaacacca

SEQ ID NO: 2449 - DNA, 19 bp, homo sapiens
  tDNA59_GluCTC_1_+_249168447_249168518@36.54.19,tr
caccgccgcggcccgggtt

SEQ ID NO: 2450 - DNA, 20 bp, homo sapiens
  tDNA59_GluCTC_1_+_249168447_249168518@36.55.20,tr
caccgccgcggcccgggttc

SEQ ID NO: 2451 - DNA, 21 bp, homo sapiens
  tDNA59_GluCTC_1_+_249168447_249168518@36.56.21,tr
caccgccgcggcccgggttcg

SEQ ID NO: 2452 - DNA, 22 bp, homo sapiens
  tDNA59_GluCTC_1_+_249168447_249168518@36.57.22,tr
caccgccgcggcccgggttcga

SEQ ID NO: 2453 - DNA, 30 bp, homo sapiens
  tDNA59_GluCTC_1_+_249168447_249168518@36.65.30,tr
caccgccgcggcccgggttcgattcccggt

SEQ ID NO: 2454 - DNA, 18 bp, homo sapiens
  tDNAMT_LysTTT_MT_+_8295_8364@55.72.18,tDNAlookali
cacctctttacagtgacc

SEQ ID NO: 2455 - DNA, 19 bp, homo sapiens
  tDNAMT_LysTTT_MT_+_8295_8364@55.73.19,tDNAlookali
cacctctttacagtgacca

SEQ ID NO: 2456 - DNA, 21 bp, homo sapiens
  tDNA37_ValAAC_6_+_27203288_27203360@36.56.21,tDNA
cacgcgaaaggtccccggttc

SEQ ID NO: 2457 - DNA, 29 bp, homo sapiens
  tDNA144_AspGTC_6_-_27551236_27551307@36.64.29,trn
cacgcgggagaccggggttcgattccccg

SEQ ID NO: 2458 - DNA, 16 bp, homo sapiens
  tDNA1_TrpCCA_7_+_99067307_99067378@60.75.16,tDNA6
cacgtcggggtcacca

SEQ ID NO: 2459 - DNA, 16 bp, homo sapiens
  tDNA22_GlnCTG_1_+_147800937_147801008@23.38.16,tr
cactctggactctgaa

SEQ ID NO: 2460 - DNA, 17 bp, homo sapiens
  tDNA22_GlnCTG_1_+_147800937_147801008@23.39.17,tr
cactctggactctgaat

SEQ ID NO: 2461 - DNA, 18 bp, homo sapiens
  tDNA22_GlnCTG_1_+_147800937_147801008@23.40.18,tr
cactctggactctgaatc

SEQ ID NO: 2462 - DNA, 19 bp, homo sapiens
  tDNA22_GlnCTG_1_+_147800937_147801008@23.41.19,tr
cactctggactctgaatcc

SEQ ID NO: 2463 - DNA, 20 bp, homo sapiens
  tDNA22_GlnCTG_1_+_147800937_147801008@23.42.20,tr
cactctggactctgaatcca

SEQ ID NO: 2464 - DNA, 21 bp, homo sapiens
  tDNA22_GlnCTG_1_+_147800937_147801008@23.43.21,tr
cactctggactctgaatccag

SEQ ID NO: 2465 - DNA, 22 bp, homo sapiens
  tDNA22_GlnCTG_1_+_147800937_147801008@23.44.22,tr
cactctggactctgaatccagc

SEQ ID NO: 2466 - DNA, 23 bp, homo sapiens
  tDNA131_GlnCTG_6_-_27759135_27759206@23.45.23,trn
cactctggactctgaatccagcg

SEQ ID NO: 2467 - DNA, 26 bp, homo sapiens
  tDNA131_GlnCTG_6_-_27759135_27759206@23.48.26,trn
cactctggactctgaatccagcgatc

SEQ ID NO: 2468 - DNA, 30 bp, homo sapiens
  tDNA131_GlnCTG_6_-_27759135_27759206@23.52.30,trn
cactctggactctgaatccagcgatccgag

SEQ ID NO: 2469 - DNA, 16 bp, homo sapiens
  tDNA130_GlnTTG_6_-_27763640_27763711@23.38.16,trn
cactctggactttgaa

SEQ ID NO: 2470 - DNA, 17 bp, homo sapiens
  tDNA130_GlnTTG_6_-_27763640_27763711@23.39.17,trn
cactctggactttgaat

SEQ ID NO: 2471 - DNA, 18 bp, homo sapiens
  tDNA130_GlnTTG_6_-_27763640_27763711@23.40.18,trn
cactctggactttgaatc

SEQ ID NO: 2472 - DNA, 19 bp, homo sapiens
  tDNA130_GlnTTG_6_-_27763640_27763711@23.41.19,trn
cactctggactttgaatcc

SEQ ID NO: 2473 - DNA, 19 bp, homo sapiens
  tDNAMT_PheGAA_MT_+_577_647@31.49.19
cactgaaaatgtttagacg

SEQ ID NO: 2474 - DNA, 22 bp, homo sapiens
  tDNAMT_PheGAA_MT_+_577_647@31.52.22
cactgaaaatgtttagacgggc

SEQ ID NO: 2475 - DNA, 23 bp, homo sapiens
  tDNAMT_PheGAA_MT_+_577_647@31.53.23
cactgaaaatgtttagacgggct

SEQ ID NO: 2476 - DNA, 24 bp, homo sapiens
  tDNAMT_PheGAA_MT_+_577_647@31.54.24
cactgaaaatgtttagacgggctc

SEQ ID NO: 2477 - DNA, 25 bp, homo sapiens
  tDNAMT_PheGAA_MT_+_577_647@31.55.25
cactgaaaatgtttagacgggctca

SEQ ID NO: 2478 - DNA, 26 bp, homo sapiens
  tDNAMT_PheGAA_MT_+_577_647@31.56.26
cactgaaaatgtttagacgggctcac

SEQ ID NO: 2479 - DNA, 16 bp, homo sapiens
  tDNAMT_LysTTT_MT_+_8295_8364@1.16.16,tDNAlookalik
cactgtaaagctaact

SEQ ID NO: 2480 - DNA, 17 bp, homo sapiens
  tDNAMT_LysTTT_MT_+_8295_8364@1.17.17,tDNAlookalik
cactgtaaagctaactt

SEQ ID NO: 2481 - DNA, 18 bp, homo sapiens
  tDNAMT_LysTTT_MT_+_8295_8364@1.18.18,tDNAlookalik
cactgtaaagctaactta

SEQ ID NO: 2482 - DNA, 19 bp, homo sapiens
  tDNAMT_LysTTT_MT_+_8295_8364@1.19.19,tDNAlookalik
cactgtaaagctaacttag

SEQ ID NO: 2483 - DNA, 20 bp, homo sapiens
  tDNAMT_LysTTT_MT_+_8295_8364@1.20.20,tDNAlookalik
cactgtaaagctaacttagc

SEQ ID NO: 2484 - DNA, 21 bp, homo sapiens
  tDNAMT_LysTTT_MT_+_8295_8364@1.21.21,tDNAlookalik
cactgtaaagctaacttagca

SEQ ID NO: 2485 - DNA, 22 bp, homo sapiens
  tDNAMT_LysTTT_MT_+_8295_8364@1.22.22,tDNAlookalik
cactgtaaagctaacttagcat

SEQ ID NO: 2486 - DNA, 23 bp, homo sapiens
  tDNAMT_LysTTT_MT_+_8295_8364@1.23.23,tDNAlookalik
cactgtaaagctaacttagcatt

SEQ ID NO: 2487 - DNA, 24 bp, homo sapiens
  tDNAMT_LysTTT_MT_+_8295_8364@1.24.24,tDNAlookalik
cactgtaaagctaacttagcatta

SEQ ID NO: 2488 - DNA, 25 bp, homo sapiens
  tDNAMT_LysTTT_MT_+_8295_8364@1.25.25,tDNAlookalik
cactgtaaagctaacttagcattaa

SEQ ID NO: 2489 - DNA, 26 bp, homo sapiens
  tDNAMT_LysTTT_MT_+_8295_8364@1.26.26,tDNAlookalik
cactgtaaagctaacttagcattaac

SEQ ID NO: 2490 - DNA, 27 bp, homo sapiens
  tDNAMT_LysTTT_MT_+_8295_8364@1.27.27,tDNAlookalik
cactgtaaagctaacttagcattaacc

SEQ ID NO: 2491 - DNA, 28 bp, homo sapiens
  tDNAMT_LysTTT_MT_+_8295_8364@1.28.28,tDNAlookalik
cactgtaaagctaacttagcattaacct

SEQ ID NO: 2492 - DNA, 29 bp, homo sapiens
  tDNAMT_LysTTT_MT_+_8295_8364@1.29.29,tDNAlookalik
cactgtaaagctaacttagcattaacctt

SEQ ID NO: 2493 - DNA, 30 bp, homo sapiens
  tDNAMT_LysTTT_MT_+_8295_8364@1.30.30,tDNAlookalik
cactgtaaagctaacttagcattaaccttt

SEQ ID NO: 2494 - DNA, 30 bp, homo sapiens
  tDNAMT_ValTAC_MT_+_1602_1670@34.63.30
cacttaggagatttcaacttaacttgaccg

SEQ ID NO: 2495 - DNA, 17 bp, homo sapiens
  tDNAMT_ProTGG_MT_-_15956_16023@1.17.17
cagagaatagtttaaat

SEQ ID NO: 2496 - DNA, 18 bp, homo sapiens
  tDNAMT_ProTGG_MT_-_15956_16023@1.18.18
cagagaatagtttaaatt

SEQ ID NO: 2497 - DNA, 20 bp, homo sapiens
  tDNAMT_ProTGG_MT_-_15956_16023@1.20.20
cagagaatagtttaaattag

SEQ ID NO: 2498 - DNA, 21 bp, homo sapiens
  tDNAMT_ProTGG_MT_-_15956_16023@1.21.21
cagagaatagtttaaattaga

SEQ ID NO: 2499 - DNA, 22 bp, homo sapiens
  tDNAMT_ProTGG_MT_-_15956_16023@1.22.22
cagagaatagtttaaattagaa

SEQ ID NO: 2500 - DNA, 24 bp, homo sapiens
  tDNAMT_ProTGG_MT_-_15956_16023@1.24.24
cagagaatagtttaaattagaatc

SEQ ID NO: 2501 - DNA, 30 bp, homo sapiens
  tDNAMT_ProTGG_MT_-_15956_16023@1.30.30
cagagaatagtttaaattagaatcttagct

SEQ ID NO: 2502 - DNA, 29 bp, homo sapiens
  tDNA61_MetCAT_6_+_27745664_27745735@3.31.29,tDNA3
cagagtggcgcagcggaagcgtgctgggc

SEQ ID NO: 2503 - DNA, 28 bp, homo sapiens
  tDNAMT_ValTAC_MT_+_1602_1670@1.28.28
cagagtgtagcttaacacaaagcaccca

SEQ ID NO: 2504 - DNA, 17 bp, homo sapiens
  tDNAMT_HisGTG_MT_+_12138_12206@25.41.17
cagattgtgaatctgac

SEQ ID NO: 2505 - DNA, 18 bp, homo sapiens
  tDNAMT_HisGTG_MT_+_12138_12206@25.42.18
cagattgtgaatctgaca

SEQ ID NO: 2506 - DNA, 20 bp, homo sapiens
  tDNAMT_HisGTG_MT_+_12138_12206@25.44.20
cagattgtgaatctgacaac

SEQ ID NO: 2507 - DNA, 21 bp, homo sapiens
  tDNAMT_HisGTG_MT_+_12138_12206@25.45.21
cagattgtgaatctgacaaca

SEQ ID NO: 2508 - DNA, 16 bp, homo sapiens
  tDNAMT_LeuTAG_MT_+_12266_12336@16.31.16
cagctatccattggtc

SEQ ID NO: 2509 - DNA, 20 bp, homo sapiens
  tDNAMT_LeuTAG_MT_+_12266_12336@16.35.20
cagctatccattggtcttag

SEQ ID NO: 2510 - DNA, 21 bp, homo sapiens
  tDNAMT_LeuTAG_MT_+_12266_12336@16.36.21
cagctatccattggtcttagg

SEQ ID NO: 2511 - DNA, 22 bp, homo sapiens
  tDNAMT_LeuTAG_MT_+_12266_12336@16.37.22
cagctatccattggtcttaggc

SEQ ID NO: 2512 - DNA, 24 bp, homo sapiens
  tDNAMT_LeuTAG_MT_+_12266_12336@16.39.24
cagctatccattggtcttaggccc

SEQ ID NO: 2513 - DNA, 25 bp, homo sapiens
  tDNA19_TyrGTA_14_-_21121258_21121351@13.37.25,trn
cagctggtagagcggaggactgtag

SEQ ID NO: 2514 - DNA, 26 bp, homo sapiens
  tDNAMT_CysGCA_MT_-_5761_5826@44.69.26
cagcttcaaacctgccggggcttcca

SEQ ID NO: 2515 - DNA, 22 bp, homo sapiens
  tDNA17_LeuCAG_16_+_57333863_57333945@3.24.22,tDNA
caggatggccgagcggtctaag

SEQ ID NO: 2516 - DNA, 30 bp, homo sapiens
  tDNA17_LeuCAG_16_+_57333863_57333945@3.32.30,tDNA
caggatggccgagcggtctaaggcgctgcg

SEQ ID NO: 2517 - DNA, 30 bp, homo sapiens
  tDNA3_GluTTC_13_-_45492062_45492133@40.69.30,tDNA
caggcggcccgggttcgactcccggtgtgg

SEQ ID NO: 2518 - DNA, 23 bp, homo sapiens
  tDNA3_ArgCCT_7_+_139025446_139025518@41.63.23,trn
cagggattgtgggttcgagtccc

SEQ ID NO: 2519 - DNA, 27 bp, homo sapiens
  tDNAMT_TyrGTA_MT_-_5826_5891@43.69.27
caggggttaggcctctttttaccacca

SEQ ID NO: 2520 - DNA, 22 bp, homo sapiens
  tDNA54_LysTTT_1_+_204475655_204475727@49.70.22,tr
cagggttcaagtccctgttcgg

SEQ ID NO: 2521 - DNA, 28 bp, homo sapiens
  tDNA54_LysTTT_1_+_204475655_204475727@49.76.28,tr
cagggttcaagtccctgttcgggcgcca

SEQ ID NO: 2522 - DNA, 16 bp, homo sapiens
  tDNA17_LeuCAG_16_+_57333863_57333945@35.50.16,trn
caggtcgcagtctccc

SEQ ID NO: 2523 - DNA, 27 bp, homo sapiens
  tDNA145_SerAGA_6_-_27521192_27521273@59.85.27,trn
caggttcgaatcctgccgactacgcca

SEQ ID NO: 2524 - DNA, 18 bp, homo sapiens
  tDNA149_LysTTT_6_-_27302769_27302841@13.30.18,trn
cagtcggtagagcatcag

SEQ ID NO: 2525 - DNA, 19 bp, homo sapiens
  tDNA149_LysTTT_6_-_27302769_27302841@13.31.19,trn
cagtcggtagagcatcaga

SEQ ID NO: 2526 - DNA, 20 bp, homo sapiens
  tDNA149_LysTTT_6_-_27302769_27302841@13.32.20,trn
cagtcggtagagcatcagac

SEQ ID NO: 2527 - DNA, 24 bp, homo sapiens
  tDNA149_LysTTT_6_-_27302769_27302841@13.36.24,trn
cagtcggtagagcatcagactttt

SEQ ID NO: 2528 - DNA, 17 bp, homo sapiens
  tDNA6_LysCTT_19_-_52425396_52425468@13.29.17,tDNA
cagtcggtagagcatga

SEQ ID NO: 2529 - DNA, 20 bp, homo sapiens
  tDNA6_LysCTT_19_-_52425396_52425468@13.32.20,tDNA
cagtcggtagagcatgagac

SEQ ID NO: 2530 - DNA, 21 bp, homo sapiens
  tDNA6_LysCTT_19_-_52425396_52425468@13.33.21,tDNA
cagtcggtagagcatgagact

SEQ ID NO: 2531 - DNA, 19 bp, homo sapiens
  tDNA4_LysCTT_18_-_43669271_43669343@13.31.19,tDNA
cagtcggtagagcatggga

SEQ ID NO: 2532 - DNA, 20 bp, homo sapiens
  tDNA4_LysCTT_18_-_43669271_43669343@13.32.20,tDNA
cagtcggtagagcatgggac

SEQ ID NO: 2533 - DNA, 21 bp, homo sapiens
  tDNA4_LysCTT_18_-_43669271_43669343@13.33.21,tDNA
cagtcggtagagcatgggact

SEQ ID NO: 2534 - DNA, 22 bp, homo sapiens
  tDNA4_LysCTT_18_-_43669271_43669343@13.34.22,tDNA
cagtcggtagagcatgggactc

SEQ ID NO: 2535 - DNA, 23 bp, homo sapiens
  tDNA4_LysCTT_18_-_43669271_43669343@13.35.23,tDNA
cagtcggtagagcatgggactct

SEQ ID NO: 2536 - DNA, 16 bp, homo sapiens
  tDNA91_GlyCCC_1_-_149680210_149680280@13.28.16,tr
cagtggtagaattctc

SEQ ID NO: 2537 - DNA, 17 bp, homo sapiens
  tDNA91_GlyCCC_1_-_149680210_149680280@13.29.17,tr
cagtggtagaattctcg

SEQ ID NO: 2538 - DNA, 18 bp, homo sapiens
  tDNA91_GlyCCC_1_-_149680210_149680280@13.30.18,tr
cagtggtagaattctcgc

SEQ ID NO: 2539 - DNA, 19 bp, homo sapiens
  tDNA91_GlyCCC_1_-_149680210_149680280@13.31.19,tr
cagtggtagaattctcgcc

SEQ ID NO: 2540 - DNA, 20 bp, homo sapiens
  tDNA91_GlyCCC_1_-_149680210_149680280@13.32.20,tr
cagtggtagaattctcgcct

SEQ ID NO: 2541 - DNA, 21 bp, homo sapiens
  tDNA91_GlyCCC_1_-_149680210_149680280@13.33.21,tr
cagtggtagaattctcgcctc

SEQ ID NO: 2542 - DNA, 22 bp, homo sapiens
  tDNA91_GlyCCC_1_-_149680210_149680280@13.34.22,tr
cagtggtagaattctcgcctcc

SEQ ID NO: 2543 - DNA, 21 bp, homo sapiens
  tDNA18_GlyGCC_16_+_70822597_70822667@13.33.21,trn
cagtggtagaattctcgcctg

SEQ ID NO: 2544 - DNA, 22 bp, homo sapiens
  tDNA18_GlyGCC_16_+_70822597_70822667@13.34.22,trn
cagtggtagaattctcgcctgc

SEQ ID NO: 2545 - DNA, 23 bp, homo sapiens
  tDNA18_GlyGCC_16_+_70822597_70822667@13.35.23,trn
cagtggtagaattctcgcctgcc

SEQ ID NO: 2546 - DNA, 18 bp, homo sapiens
  tDNA7_CysGCA_3_-_131947944_131948015@13.30.18,trn
cagtggtagagcatttga

SEQ ID NO: 2547 - DNA, 19 bp, homo sapiens
  tDNA7_CysGCA_3_-_131947944_131948015@13.31.19,trn
cagtggtagagcatttgac

SEQ ID NO: 2548 - DNA, 20 bp, homo sapiens
  tDNA7_CysGCA_3_-_131947944_131948015@13.32.20,trn
cagtggtagagcatttgact

SEQ ID NO: 2549 - DNA, 21 bp, homo sapiens
  tDNA7_CysGCA_3_-_131947944_131948015@13.33.21,trn
cagtggtagagcatttgactg

SEQ ID NO: 2550 - DNA, 22 bp, homo sapiens
  tDNA7_CysGCA_3_-_131947944_131948015@13.34.22,trn
cagtggtagagcatttgactgc

SEQ ID NO: 2551 - DNA, 23 bp, homo sapiens
  tDNA7_CysGCA_3_-_131947944_131948015@13.35.23,trn
cagtggtagagcatttgactgca

SEQ ID NO: 2552 - DNA, 27 bp, homo sapiens
  tDNA7_CysGCA_3_-_131947944_131948015@13.39.27,trn
cagtggtagagcatttgactgcagatc

SEQ ID NO: 2553 - DNA, 18 bp, homo sapiens
  tDNA68_AlaAGC_6_+_28687481_28687552@13.30.18,tDNA
cagtggtagagcgcgtgc

SEQ ID NO: 2554 - DNA, 19 bp, homo sapiens
  tDNA68_AlaAGC_6_+_28687481_28687552@13.31.19,tDNA
cagtggtagagcgcgtgct

SEQ ID NO: 2555 - DNA, 17 bp, homo sapiens
  tDNA10_GlyTCC_17_+_8124866_8124937@40.56.17,tDNA1
cagttgacccgggttcg

SEQ ID NO: 2556 - DNA, 24 bp, homo sapiens
  tDNA14_TyrGTA_6_+_26569086_26569176@13.36.24,tDNA
cagttggtagagcggaggactgta

SEQ ID NO: 2557 - DNA, 25 bp, homo sapiens
  tDNA14_TyrGTA_6_+_26569086_26569176@13.37.25,tDNA
cagttggtagagcggaggactgtag

SEQ ID NO: 2558 - DNA, 19 bp, homo sapiens
  tDNA61_MetCAT_6_+_27745664_27745735@33.51.19,tDNA
cataacccagaggtcgatg

SEQ ID NO: 2559 - DNA, 20 bp, homo sapiens
  tDNA61_MetCAT_6_+_27745664_27745735@33.52.20,tDNA
cataacccagaggtcgatgg

SEQ ID NO: 2560 - DNA, 21 bp, homo sapiens
  tDNA61_MetCAT_6_+_27745664_27745735@33.53.21,tDNA
cataacccagaggtcgatgga

SEQ ID NO: 2561 - DNA, 22 bp, homo sapiens
  tDNA61_MetCAT_6_+_27745664_27745735@33.54.22,tDNA
cataacccagaggtcgatggat

SEQ ID NO: 2562 - DNA, 23 bp, homo sapiens
  tDNA61_MetCAT_6_+_27745664_27745735@33.55.23,tDNA
cataacccagaggtcgatggatc

SEQ ID NO: 2563 - DNA, 24 bp, homo sapiens
  tDNA32_MetCAT_1_+_153643726_153643797@33.56.24,tr
cataacccagaggtcgatggatcg

SEQ ID NO: 2564 - DNA, 21 bp, homo sapiens
  tDNA21_MetCAT_6_+_26701712_26701784@34.54.21,tDNA
cataatctgaaggtcctgagt

SEQ ID NO: 2565 - DNA, 21 bp, homo sapiens
  tDNA22_MetCAT_16_-_87417628_87417700@34.54.21,trn
cataatctgaaggtcgtgagt

SEQ ID NO: 2566 - DNA, 17 bp, homo sapiens
  tDNAMT_GluTTC_MT_-_14674_14742@33.49.17,tDNAlooka
catatcattggtcgtgg

SEQ ID NO: 2567 - DNA, 23 bp, homo sapiens
  tDNAMT_GluTTC_MT_-_14674_14742@33.55.23,tDNAlooka
catatcattggtcgtggttgtag

SEQ ID NO: 2568 - DNA, 24 bp, homo sapiens
  tDNAMT_GluTTC_MT_-_14674_14742@33.56.24,tDNAlooka
catatcattggtcgtggttgtagt

SEQ ID NO: 2569 - DNA, 25 bp, homo sapiens
  tDNAMT_GluTTC_MT_-_14674_14742@33.57.25,tDNAlooka
catatcattggtcgtggttgtagtc

SEQ ID NO: 2570 - DNA, 26 bp, homo sapiens
  tDNAMT_GluTTC_MT_-_14674_14742@33.58.26,tDNAlooka
catatcattggtcgtggttgtagtcc

SEQ ID NO: 2571 - DNA, 30 bp, homo sapiens
  tDNAMT_GluTTC_MT_-_14674_14742@33.62.30,tDNAlooka
catatcattggtcgtggttgtagtccgtgc

SEQ ID NO: 2572 - DNA, 28 bp, homo sapiens
  tDNA5_GluTTC_13_-_41634874_41634945@4.31.28,tDNA2
catatggtctagcggttaggattcctgg

SEQ ID NO: 2573 - DNA, 16 bp, homo sapiens
  tDNAMT_PheGAA_MT_+_577_647@56.71.16
catcaccccataaaca

SEQ ID NO: 2574 - DNA, 18 bp, homo sapiens
  tDNAMT_PheGAA_MT_+_577_647@56.73.18
catcaccccataaacacc

SEQ ID NO: 2575 - DNA, 19 bp, homo sapiens
  tDNAMT_PheGAA_MT_+_577_647@56.74.19
catcaccccataaacacca

SEQ ID NO: 2576 - DNA, 21 bp, homo sapiens
  tDNAMT_HisGTG_MT_+_12138_12206@22.42.21
catcagattgtgaatctgaca

SEQ ID NO: 2577 - DNA, 24 bp, homo sapiens
  tDNAMT_HisGTG_MT_+_12138_12206@22.45.24
catcagattgtgaatctgacaaca

SEQ ID NO: 2578 - DNA, 26 bp, homo sapiens
  tDNAMT_SerGCT_MT_+_12207_12265@27.52.26
catgcccccatgtctaacaacatggc

SEQ ID NO: 2579 - DNA, 30 bp, homo sapiens
  tDNAMT_SerGCT_MT_+_12207_12265@27.56.30
catgcccccatgtctaacaacatggctttc

SEQ ID NO: 2580 - DNA, 16 bp, homo sapiens
  tDNA6_LysCTT_15_-_76674765_76674838@25.40.16,tDNA
catgggactcttaatc

SEQ ID NO: 2581 - DNA, 22 bp, homo sapiens
  tDNA35_GlyGCC_1_+_161413094_161413164@2.23.22,trn
catgggtggttcagtggtagaa

SEQ ID NO: 2582 - DNA, 23 bp, homo sapiens
  tDNA35_GlyGCC_1_+_161413094_161413164@2.24.23,trn
catgggtggttcagtggtagaat

SEQ ID NO: 2583 - DNA, 25 bp, homo sapiens
  tDNA3_GluTTC_13_-_45492062_45492133@6.30.25,tDNA1
catggtctagcggttaggattcctg

SEQ ID NO: 2584 - DNA, 26 bp, homo sapiens
  tDNA3_GluTTC_13_-_45492062_45492133@6.31.26,tDNA1
catggtctagcggttaggattcctgg

SEQ ID NO: 2585 - DNA, 24 bp, homo sapiens
  tDNA42_GlnCTG_6_+_27263212_27263283@6.29.24,tDNA1
catggtgtaatggttagcactctg

SEQ ID NO: 2586 - DNA, 25 bp, homo sapiens
  tDNA42_GlnCTG_6_+_27263212_27263283@6.30.25,tDNA1
catggtgtaatggttagcactctgg

SEQ ID NO: 2587 - DNA, 26 bp, homo sapiens
  tDNA42_GlnCTG_6_+_27263212_27263283@6.31.26,tDNA1
catggtgtaatggttagcactctgga

SEQ ID NO: 2588 - DNA, 19 bp, homo sapiens
  tDNAMT_GlyTCC_MT_+_9991_10058@53.71.19
cattcaaaaaagagtacca

SEQ ID NO: 2589 - DNA, 18 bp, homo sapiens
  tDNA34_GlyCCC_16_-_686736_686806@35.52.18,tDNA27_
cattcttgcgacccgggt

SEQ ID NO: 2590 - DNA, 17 bp, homo sapiens
  tDNAMT_TyrGTA_MT_-_5826_5891@21.37.17
cattggactgtaaatct

SEQ ID NO: 2591 - DNA, 24 bp, homo sapiens
  tDNAMT_TyrGTA_MT_-_5826_5891@21.44.24
cattggactgtaaatctaaagaca

SEQ ID NO: 2592 - DNA, 16 bp, homo sapiens
  tDNAMT_GluTTC_MT_-_14674_14742@38.53.16,tDNAlooka
cattggtcgtggttgt

SEQ ID NO: 2593 - DNA, 17 bp, homo sapiens
  tDNAMT_GluTTC_MT_-_14674_14742@38.54.17,tDNAlooka
cattggtcgtggttgta

SEQ ID NO: 2594 - DNA, 18 bp, homo sapiens
  tDNAMT_GluTTC_MT_-_14674_14742@38.55.18,tDNAlooka
cattggtcgtggttgtag

SEQ ID NO: 2595 - DNA, 19 bp, homo sapiens
  tDNAMT_GluTTC_MT_-_14674_14742@38.56.19,tDNAlooka
cattggtcgtggttgtagt

SEQ ID NO: 2596 - DNA, 20 bp, homo sapiens
  tDNAMT_GluTTC_MT_-_14674_14742@38.57.20,tDNAlooka
cattggtcgtggttgtagtc

SEQ ID NO: 2597 - DNA, 21 bp, homo sapiens
  tDNAMT_GluTTC_MT_-_14674_14742@38.58.21,tDNAlooka
cattggtcgtggttgtagtcc

SEQ ID NO: 2598 - DNA, 22 bp, homo sapiens
  tDNAMT_GluTTC_MT_-_14674_14742@38.59.22,tDNAlooka
cattggtcgtggttgtagtccg

SEQ ID NO: 2599 - DNA, 23 bp, homo sapiens
  tDNAMT_GluTTC_MT_-_14674_14742@38.60.23,tDNAlooka
cattggtcgtggttgtagtccgt

SEQ ID NO: 2600 - DNA, 24 bp, homo sapiens
  tDNAMT_GluTTC_MT_-_14674_14742@38.61.24,tDNAlooka
cattggtcgtggttgtagtccgtg

SEQ ID NO: 2601 - DNA, 25 bp, homo sapiens
  tDNAMT_GluTTC_MT_-_14674_14742@38.62.25,tDNAlooka
cattggtcgtggttgtagtccgtgc

SEQ ID NO: 2602 - DNA, 26 bp, homo sapiens
  tDNAMT_GluTTC_MT_-_14674_14742@38.63.26,tDNAlooka
cattggtcgtggttgtagtccgtgcg

SEQ ID NO: 2603 - DNA, 27 bp, homo sapiens
  tDNAMT_GluTTC_MT_-_14674_14742@38.64.27,tDNAlooka
cattggtcgtggttgtagtccgtgcga

SEQ ID NO: 2604 - DNA, 28 bp, homo sapiens
  tDNAMT_GluTTC_MT_-_14674_14742@38.65.28,tDNAlooka
cattggtcgtggttgtagtccgtgcgag

SEQ ID NO: 2605 - DNA, 29 bp, homo sapiens
  tDNAMT_GluTTC_MT_-_14674_14742@38.66.29,tDNAlooka
cattggtcgtggttgtagtccgtgcgaga

SEQ ID NO: 2606 - DNA, 19 bp, homo sapiens
  tDNAMT_HisGTG_MT_+_12138_12206@16.34.19
ccaaaacatcagattgtga

SEQ ID NO: 2607 - DNA, 21 bp, homo sapiens
  tDNAMT_HisGTG_MT_+_12138_12206@16.36.21
ccaaaacatcagattgtgaat

SEQ ID NO: 2608 - DNA, 22 bp, homo sapiens
  tDNAMT_HisGTG_MT_+_12138_12206@16.37.22
ccaaaacatcagattgtgaatc

SEQ ID NO: 2609 - DNA, 23 bp, homo sapiens
  tDNAMT_HisGTG_MT_+_12138_12206@16.38.23
ccaaaacatcagattgtgaatct

SEQ ID NO: 2610 - DNA, 27 bp, homo sapiens
  tDNAMT_HisGTG_MT_+_12138_12206@16.42.27
ccaaaacatcagattgtgaatctgaca

SEQ ID NO: 2611 - DNA, 29 bp, homo sapiens
  tDNAMT_HisGTG_MT_+_12138_12206@16.44.29
ccaaaacatcagattgtgaatctgacaac

SEQ ID NO: 2612 - DNA, 16 bp, homo sapiens
  tDNAMT_LysTTT_MT_+_8295_8364@51.66.16,tDNAlookali
ccaacacctctttaca

SEQ ID NO: 2613 - DNA, 17 bp, homo sapiens
  tDNAMT_LysTTT_MT_+_8295_8364@51.67.17,tDNAlookali
ccaacacctctttacag

SEQ ID NO: 2614 - DNA, 21 bp, homo sapiens
  tDNAMT_LysTTT_MT_+_8295_8364@51.71.21,tDNAlookali
ccaacacctctttacagtgac

SEQ ID NO: 2615 - DNA, 22 bp, homo sapiens
  tDNAMT_LysTTT_MT_+_8295_8364@51.72.22,tDNAlookali
ccaacacctctttacagtgacc

SEQ ID NO: 2616 - DNA, 23 bp, homo sapiens
  tDNAMT_LysTTT_MT_+_8295_8364@51.73.23,tDNAlookali
ccaacacctctttacagtgacca

SEQ ID NO: 2617 - DNA, 28 bp, homo sapiens
  tDNA3_GluTTC_13_-_45492062_45492133@3.30.28,tDNA1
ccacatggtctagcggttaggattcctg

SEQ ID NO: 2618 - DNA, 29 bp, homo sapiens
  tDNA3_GluTTC_13_-_45492062_45492133@3.31.29,tDNA1
ccacatggtctagcggttaggattcctgg

SEQ ID NO: 2619 - DNA, 16 bp, homo sapiens
  tDNA20_AsnATT_1_+_147719029_147719102@62.77.16,tr
ccacccagggacgcca

SEQ ID NO: 2620 - DNA, 24 bp, homo sapiens
  tDNA58_LeuCAA_1_+_249168054_249168159@28.51.24
ccagactcaagttctggtctccgg

SEQ ID NO: 2621 - DNA, 21 bp, homo sapiens
  tDNA32_MetCAT_1_+_153643726_153643797@39.59.21,tr
ccagaggtcgatggatcgaaa

SEQ ID NO: 2622 - DNA, 22 bp, homo sapiens
  tDNA32_MetCAT_1_+_153643726_153643797@39.60.22,tr
ccagaggtcgatggatcgaaac

SEQ ID NO: 2623 - DNA, 24 bp, homo sapiens
  tDNA3_ArgCCT_7_+_139025446_139025518@40.63.24,trn
ccagggattgtgggttcgagtccc

SEQ ID NO: 2624 - DNA, 21 bp, homo sapiens
  tDNA126_LeuAAG_6_-_28446400_28446481@41.61.21,trn
ccagtctcttcgggggcgtgg

SEQ ID NO: 2625 - DNA, 20 bp, homo sapiens
  tDNA61_MetCAT_6_+_27745664_27745735@32.51.20,tDNA
ccataacccagaggtcgatg

SEQ ID NO: 2626 - DNA, 21 bp, homo sapiens
  tDNA61_MetCAT_6_+_27745664_27745735@32.52.21,tDNA
ccataacccagaggtcgatgg

SEQ ID NO: 2627 - DNA, 22 bp, homo sapiens
  tDNA61_MetCAT_6_+_27745664_27745735@32.53.22,tDNA
ccataacccagaggtcgatgga

SEQ ID NO: 2628 - DNA, 23 bp, homo sapiens
  tDNA61_MetCAT_6_+_27745664_27745735@32.54.23,tDNA
ccataacccagaggtcgatggat

SEQ ID NO: 2629 - DNA, 24 bp, homo sapiens
  tDNA61_MetCAT_6_+_27745664_27745735@32.55.24,tDNA
ccataacccagaggtcgatggatc

SEQ ID NO: 2630 - DNA, 28 bp, homo sapiens
  tDNA5_GluTTC_13_-_41634874_41634945@3.30.28,tDNA2
ccatatggtctagcggttaggattcctg

SEQ ID NO: 2631 - DNA, 29 bp, homo sapiens
  tDNA5_GluTTC_13_-_41634874_41634945@3.31.29,tDNA2
ccatatggtctagcggttaggattcctgg

SEQ ID NO: 2632 - DNA, 16 bp, homo sapiens
  tDNA1_MetCAT_9_+_19403996_19404070@63.78.16,tDNA6
ccatcctctgctacca

SEQ ID NO: 2633 - DNA, 25 bp, homo sapiens
  tDNA42_GlnCTG_6_+_27263212_27263283@5.29.25,tDNA1
ccatggtgtaatggttagcactctg

SEQ ID NO: 2634 - DNA, 26 bp, homo sapiens
  tDNA42_GlnCTG_6_+_27263212_27263283@5.30.26,tDNA1
ccatggtgtaatggttagcactctgg

SEQ ID NO: 2635 - DNA, 29 bp, homo sapiens
  tDNA3_GluTTC_13_-_45492062_45492133@2.30.29,tDNA1
cccacatggtctagcggttaggattcctg

SEQ ID NO: 2636 - DNA, 30 bp, homo sapiens
  tDNA3_GluTTC_13_-_45492062_45492133@2.31.30,tDNA1
cccacatggtctagcggttaggattcctgg

SEQ ID NO: 2637 - DNA, 16 bp, homo sapiens
  tDNA4_ArgTCT_17_+_8024243_8024330@61.76.16,tDNA3_
cccaccagagtcgcca

SEQ ID NO: 2638 - DNA, 17 bp, homo sapiens
  tDNA136_AsnGTT_1_-_16847080_16847153@61.77.17,trn
cccacccagggacgcca

SEQ ID NO: 2639 - DNA, 16 bp, homo sapiens
  tDNA31_SerGCT_6_+_27065085_27065166@70.85.16
cccaccctcgtcgcca

SEQ ID NO: 2640 - DNA, 16 bp, homo sapiens
  tDNA126_LeuAAG_6_-_28446400_28446481@70.85.16,trn
cccaccgctgccacca

SEQ ID NO: 2641 - DNA, 16 bp, homo sapiens
  tDNA10_LysCTT_16_+_3241501_3241573@61.76.16,tDNA3
cccacgttgggcgcca

SEQ ID NO: 2642 - DNA, 16 bp, homo sapiens
  tDNA34_LeuCAG_1_+_161411323_161411405@71.86.16,tr
cccactcctgacacca

SEQ ID NO: 2643 - DNA, 16 bp, homo sapiens
  tDNA17_LeuCAG_16_+_57333863_57333945@71.86.16,trn
cccacttctgacacca

SEQ ID NO: 2644 - DNA, 22 bp, homo sapiens
  tDNA32_MetCAT_1_+_153643726_153643797@38.59.22,tr
cccagaggtcgatggatcgaaa

SEQ ID NO: 2645 - DNA, 16 bp, homo sapiens
  tDNA120_AlaAGC_6_-_28626014_28626085@60.75.16
cccagcatctccacca

SEQ ID NO: 2646 - DNA, 16 bp, homo sapiens
  tDNA34_ThrAGT_6_+_27130050_27130123@62.77.16,tDNA
cccagcggggcctcca

SEQ ID NO: 2647 - DNA, 16 bp, homo sapiens
  tDNA40_ThrAGT_17_-_8042770_8042843@62.77.16,tDNA3
cccagcggtgcctcca

SEQ ID NO: 2648 - DNA, 21 bp, homo sapiens
  tDNA3_GluTTC_13_-_45492062_45492133@38.58.21,tDNA
cccaggcggcccgggttcgac

SEQ ID NO: 2649 - DNA, 16 bp, homo sapiens
  tDNA108_AlaAGC_6_-_28763741_28763812@60.75.16
cccagtacctccacca

SEQ ID NO: 2650 - DNA, 16 bp, homo sapiens
  tDNA127_ThrTGT_6_-_28442329_28442402@62.77.16
cccagtagagcctcca

SEQ ID NO: 2651 - DNA, 16 bp, homo sapiens
  tDNA6_ValTAC_10_-_5895674_5895746@61.76.16,tDNA16
cccagtggaaccacca

SEQ ID NO: 2652 - DNA, 21 bp, homo sapiens
  tDNA61_MetCAT_6_+_27745664_27745735@31.51.21,tDNA
cccataacccagaggtcgatg

SEQ ID NO: 2653 - DNA, 22 bp, homo sapiens
  tDNA61_MetCAT_6_+_27745664_27745735@31.52.22,tDNA
cccataacccagaggtcgatgg

SEQ ID NO: 2654 - DNA, 23 bp, homo sapiens
  tDNA61_MetCAT_6_+_27745664_27745735@31.53.23,tDNA
cccataacccagaggtcgatgga

SEQ ID NO: 2655 - DNA, 21 bp, homo sapiens
  tDNAMT_MetCAT_MT_+_4402_4469@29.49.21
cccataccccgaaaatgttgg

SEQ ID NO: 2656 - DNA, 30 bp, homo sapiens
  tDNA5_GluTTC_13_-_41634874_41634945@2.31.30,tDNA2
cccatatggtctagcggttaggattcctgg

SEQ ID NO: 2657 - DNA, 16 bp, homo sapiens
  tDNA175_SerGCT_6_-_26305718_26305801@72.87.16,trn
cccatcctcgtcgcca

SEQ ID NO: 2658 - DNA, 16 bp, homo sapiens
  tDNA23_ArgCCG_17_-_66016013_66016085@61.76.16
cccatctgggtcgcca

SEQ ID NO: 2659 - DNA, 27 bp, homo sapiens
  tDNA84_GlnTTG_6_+_145503859_145503930@4.30.27,trn
cccatggtgtaatggttagcactctgg

SEQ ID NO: 2660 - DNA, 20 bp, homo sapiens
  tDNAMT_SerGCT_MT_+_12207_12265@33.52.20
cccatgtctaacaacatggc

SEQ ID NO: 2661 - DNA, 16 bp, homo sapiens
  tDNAMT_AsnGTT_MT_-_5657_5729@61.76.16,tDNAlookali
cccattggtctagcca

SEQ ID NO: 2662 - DNA, 17 bp, homo sapiens
  tDNA10_LysCTT_16_+_3241501_3241573@60.76.17,tDNA3
ccccacgttgggcgcca

SEQ ID NO: 2663 - DNA, 17 bp, homo sapiens
  tDNA83_LeuTAA_6_+_144537684_144537766@70.86.17
ccccactcctggtacca

SEQ ID NO: 2664 - DNA, 16 bp, homo sapiens
  tDNA120_AlaAGC_6_-_28626014_28626085@59.74.16
ccccagcatctccacc

SEQ ID NO: 2665 - DNA, 17 bp, homo sapiens
  tDNA120_AlaAGC_6_-_28626014_28626085@59.75.17
ccccagcatctccacca

SEQ ID NO: 2666 - DNA, 17 bp, homo sapiens
  tDNA108_AlaAGC_6_-_28763741_28763812@59.75.17
ccccagtacctccacca

SEQ ID NO: 2667 - DNA, 17 bp, homo sapiens
  tDNA6_ValTAC_10_-_5895674_5895746@60.76.17,tDNA16
ccccagtggaaccacca

SEQ ID NO: 2668 - DNA, 18 bp, homo sapiens
  tDNA70_AlaCGC_6_+_28697092_28697163@58.75.18
cccccggctcctccacca

SEQ ID NO: 2669 - DNA, 17 bp, homo sapiens
  tDNAMT_IleGAT_MT_+_4263_4331@56.72.17
cccccttatttctacca

SEQ ID NO: 2670 - DNA, 25 bp, homo sapiens
  tDNA69_AspGTC_1_-_161440205_161440276@26.50.25,tr
ccccgcctgtcacgcgggagaccgg

SEQ ID NO: 2671 - DNA, 16 bp, homo sapiens
  tDNA65_AlaAGC_6_+_28574933_28575004@59.74.16,tDNA
ccccggcacctccacc

SEQ ID NO: 2672 - DNA, 17 bp, homo sapiens
  tDNA65_AlaAGC_6_+_28574933_28575004@59.75.17,tDNA
ccccggcacctccacca

SEQ ID NO: 2673 - DNA, 17 bp, homo sapiens
  tDNA13_AlaCGC_2_+_157257281_157257352@59.75.17,tr
ccccggcatctccacca

SEQ ID NO: 2674 - DNA, 17 bp, homo sapiens
  tDNA70_AlaCGC_6_+_28697092_28697163@59.75.17
ccccggctcctccacca

SEQ ID NO: 2675 - DNA, 17 bp, homo sapiens
  tDNA57_IleAAT_6_+_27636362_27636435@61.77.17,tDNA
ccccgtacgggccacca

SEQ ID NO: 2676 - DNA, 17 bp, homo sapiens
  tDNA14_ThrCGT_17_+_29877093_29877164@59.75.17,trn
ccccgtccgtgcctcca

SEQ ID NO: 2677 - DNA, 16 bp, homo sapiens
  tDNAMT_HisGTG_MT_+_12138_12206@57.72.16
ccccttatttacccca

SEQ ID NO: 2678 - DNA, 16 bp, homo sapiens
  tDNA3_AlaAGC_2_+_27274082_27274154@61.76.16,tDNA6
cccgcatcctccacca

SEQ ID NO: 2679 - DNA, 16 bp, homo sapiens
  tDNA9_AlaAGC_14_+_89445442_89445514@61.76.16,tDNA
cccgcattctccacca

SEQ ID NO: 2680 - DNA, 24 bp, homo sapiens
  tDNA69_AspGTC_1_-_161440205_161440276@27.50.24,tr
cccgcctgtcacgcgggagaccgg

SEQ ID NO: 2681 - DNA, 16 bp, homo sapiens
  tDNA65_ProAGG_1_-_167684725_167684796@60.75.16,tr
cccggacgagccccca

SEQ ID NO: 2682 - DNA, 18 bp, homo sapiens
  tDNA5_LysTTT_11_+_59323902_59323974@2.19.18,tDNA5
cccggatagctcagtcgg

SEQ ID NO: 2683 - DNA, 22 bp, homo sapiens
  tDNA5_LysTTT_11_+_59323902_59323974@2.23.22,tDNA5
cccggatagctcagtcggtaga

SEQ ID NO: 2684 - DNA, 16 bp, homo sapiens
  tDNA65_AlaAGC_6_+_28574933_28575004@60.75.16,tDNA
cccggcacctccacca

SEQ ID NO: 2685 - DNA, 16 bp, homo sapiens
  tDNA13_AlaCGC_2_+_157257281_157257352@60.75.16,tr
cccggcatctccacca

SEQ ID NO: 2686 - DNA, 16 bp, homo sapiens
  tDNA10_GlyTCC_17_+_8124866_8124937@60.75.16,tDNA1
cccggccaacgcacca

SEQ ID NO: 2687 - DNA, 16 bp, homo sapiens
  tDNA2_GlyCCC_1_+_17053780_17053850@59.74.16,tDNA1
cccggccaatgcacca

SEQ ID NO: 2688 - DNA, 29 bp, homo sapiens
  tDNA3_GluTTC_13_-_45492062_45492133@47.75.29,tDNA
cccgggttcgactcccggtgtgggaacca

SEQ ID NO: 2689 - DNA, 17 bp, homo sapiens
  tDNA103_PheGAA_6_-_28791093_28791166@61.77.17,trn
cccgggtttcggcacca

SEQ ID NO: 2690 - DNA, 16 bp, homo sapiens
  tDNA57_IleAAT_6_+_27636362_27636435@62.77.16,tDNA
cccgtacgggccacca

SEQ ID NO: 2691 - DNA, 16 bp, homo sapiens
  tDNA14_ThrCGT_17_+_29877093_29877164@60.75.16,trn
cccgtccgtgcctcca

SEQ ID NO: 2692 - DNA, 17 bp, homo sapiens
  tDNA2_SerTGA_10_+_69524261_69524342@69.85.17
ccctgctcgctgcgcca

SEQ ID NO: 2693 - DNA, 27 bp, homo sapiens
  tDNA59_GluCTC_1_+_249168447_249168518@2.28.27,trn
ccctggtggtctagtggttaggattcg

SEQ ID NO: 2694 - DNA, 28 bp, homo sapiens
  tDNA59_GluCTC_1_+_249168447_249168518@2.29.28,trn
ccctggtggtctagtggttaggattcgg

SEQ ID NO: 2695 - DNA, 29 bp, homo sapiens
  tDNA59_GluCTC_1_+_249168447_249168518@2.30.29,trn
ccctggtggtctagtggttaggattcggc

SEQ ID NO: 2696 - DNA, 30 bp, homo sapiens
  tDNA59_GluCTC_1_+_249168447_249168518@2.31.30,trn
ccctggtggtctagtggttaggattcggcg

SEQ ID NO: 2697 - DNA, 29 bp, homo sapiens
  tDNA103_PheGAA_6_-_28791093_28791166@49.77.29,trn
ccctggttcaatcccgggtttcggcacca

SEQ ID NO: 2698 - DNA, 26 bp, homo sapiens
  tDNA15_PheGAA_11_-_59324970_59325042@48.73.26,trn
ccctggttcgatcccgggtttcggca

SEQ ID NO: 2699 - DNA, 27 bp, homo sapiens
  tDNA15_PheGAA_11_-_59324970_59325042@48.74.27,trn
ccctggttcgatcccgggtttcggcac

SEQ ID NO: 2700 - DNA, 28 bp, homo sapiens
  tDNA15_PheGAA_11_-_59324970_59325042@48.75.28,trn
ccctggttcgatcccgggtttcggcacc

SEQ ID NO: 2701 - DNA, 29 bp, homo sapiens
  tDNA15_PheGAA_11_-_59324970_59325042@48.76.29,trn
ccctggttcgatcccgggtttcggcacca

SEQ ID NO: 2702 - DNA, 16 bp, homo sapiens
  tDNA5_LysTTT_11_+_59323902_59323974@61.76.16,tDNA
ccctgttcgggcgcca

SEQ ID NO: 2703 - DNA, 17 bp, homo sapiens
  tDNAMT_MetCAT_MT_+_4402_4469@55.71.17
cccttcccgtactacca

SEQ ID NO: 2704 - DNA, 16 bp, homo sapiens
  tDNA124_ArgTCG_6_-_28510891_28510963@61.76.16
cccttcgtggttgcca

SEQ ID NO: 2705 - DNA, 20 bp, homo sapiens
  tDNAMT_MetCAT_MT_+_4402_4469@37.56.20
ccgaaaatgttggttatacc

SEQ ID NO: 2706 - DNA, 16 bp, homo sapiens
  tDNA106_HisGTG_1_-_149155828_149155899@60.75.16,t
ccgagtcacggcacca

SEQ ID NO: 2707 - DNA, 22 bp, homo sapiens
  tDNA69_AspGTC_1_-_161440205_161440276@28.49.22,tr
ccgcctgtcacgcgggagaccg

SEQ ID NO: 2708 - DNA, 23 bp, homo sapiens
  tDNA69_AspGTC_1_-_161440205_161440276@28.50.23,tr
ccgcctgtcacgcgggagaccgg

SEQ ID NO: 2709 - DNA, 19 bp, homo sapiens
  tDNA23_ArgCCG_17_-_66016013_66016085@34.52.19
ccggagctggggattgtgg

SEQ ID NO: 2710 - DNA, 20 bp, homo sapiens
  tDNA23_ArgCCG_17_-_66016013_66016085@34.53.20
ccggagctggggattgtggg

SEQ ID NO: 2711 - DNA, 21 bp, homo sapiens
  tDNA23_ArgCCG_17_-_66016013_66016085@34.54.21
ccggagctggggattgtgggt

SEQ ID NO: 2712 - DNA, 17 bp, homo sapiens
  tDNA5_LysTTT_11_+_59323902_59323974@3.19.17,tDNA5
ccggatagctcagtcgg

SEQ ID NO: 2713 - DNA, 20 bp, homo sapiens
  tDNA5_LysTTT_11_+_59323902_59323974@3.22.20,tDNA5
ccggatagctcagtcggtag

SEQ ID NO: 2714 - DNA, 21 bp, homo sapiens
  tDNA5_LysTTT_11_+_59323902_59323974@3.23.21,tDNA5
ccggatagctcagtcggtaga

SEQ ID NO: 2715 - DNA, 22 bp, homo sapiens
  tDNA5_LysTTT_11_+_59323902_59323974@3.24.22,tDNA5
ccggatagctcagtcggtagag

SEQ ID NO: 2716 - DNA, 18 bp, homo sapiens
  tDNA58_LeuCAA_1_+_249168054_249168159@48.65.18
ccggatggaggcgtgggt

SEQ ID NO: 2717 - DNA, 22 bp, homo sapiens
  tDNA10_LysCTT_16_+_3241501_3241573@3.24.22,tDNA32
ccggctagctcagtcggtagag

SEQ ID NO: 2718 - DNA, 29 bp, homo sapiens
  tDNA10_LysCTT_16_+_3241501_3241573@3.31.29,tDNA13
ccggctagctcagtcggtagagcatggga

SEQ ID NO: 2719 - DNA, 30 bp, homo sapiens
  tDNA10_LysCTT_16_+_3241501_3241573@3.32.30,tDNA13
ccggctagctcagtcggtagagcatgggac

SEQ ID NO: 2720 - DNA, 16 bp, homo sapiens
  tDNA19_TyrGTA_14_-_21121258_21121351@61.76.16,trn
ccggctcgaaggacca

SEQ ID NO: 2721 - DNA, 16 bp, homo sapiens
  tDNA16_TyrGTA_6_+_26577332_26577420@61.76.16,tDNA
ccggctcggaggacca

SEQ ID NO: 2722 - DNA, 16 bp, homo sapiens
  tDNA29_CysGCA_17_-_37017937_37018008@60.75.16,trn
ccgggtgccccctcca

SEQ ID NO: 2723 - DNA, 28 bp, homo sapiens
  tDNA3_GluTTC_13_-_45492062_45492133@48.75.28,tDNA
ccgggttcgactcccggtgtgggaacca

SEQ ID NO: 2724 - DNA, 28 bp, homo sapiens
  tDNA92_PheGAA_1_-_149672905_149672976@48.75.28,tr
ccgggttcgattcccggtcagggaacca

SEQ ID NO: 2725 - DNA, 16 bp, homo sapiens
  tDNA103_PheGAA_6_-_28791093_28791166@62.77.16,trn
ccgggtttcggcacca

SEQ ID NO: 2726 - DNA, 28 bp, homo sapiens
  tDNA136_ValAAC_6_-_27648885_27648957@5.32.28,tDNA
ccgtagtgtagtggttatcacgttcgcc

SEQ ID NO: 2727 - DNA, 17 bp, homo sapiens
  tDNA111_HisGTG_1_-_147774845_147774916@2.18.17,tr
ccgtgatcgtatagtgg

SEQ ID NO: 2728 - DNA, 18 bp, homo sapiens
  tDNA111_HisGTG_1_-_147774845_147774916@2.19.18,tr
ccgtgatcgtatagtggt

SEQ ID NO: 2729 - DNA, 21 bp, homo sapiens
  tDNA111_HisGTG_1_-_147774845_147774916@2.22.21,tr
ccgtgatcgtatagtggttag

SEQ ID NO: 2730 - DNA, 22 bp, homo sapiens
  tDNA111_HisGTG_1_-_147774845_147774916@2.23.22,tr
ccgtgatcgtatagtggttagt

SEQ ID NO: 2731 - DNA, 23 bp, homo sapiens
  tDNA111_HisGTG_1_-_147774845_147774916@2.24.23,tr
ccgtgatcgtatagtggttagta

SEQ ID NO: 2732 - DNA, 24 bp, homo sapiens
  tDNA111_HisGTG_1_-_147774845_147774916@2.25.24,tr
ccgtgatcgtatagtggttagtac

SEQ ID NO: 2733 - DNA, 26 bp, homo sapiens
  tDNA111_HisGTG_1_-_147774845_147774916@2.27.26,tr
ccgtgatcgtatagtggttagtactc

SEQ ID NO: 2734 - DNA, 27 bp, homo sapiens
  tDNA111_HisGTG_1_-_147774845_147774916@2.28.27,tr
ccgtgatcgtatagtggttagtactct

SEQ ID NO: 2735 - DNA, 29 bp, homo sapiens
  tDNA111_HisGTG_1_-_147774845_147774916@2.30.29,tr
ccgtgatcgtatagtggttagtactctgc

SEQ ID NO: 2736 - DNA, 30 bp, homo sapiens
  tDNA111_HisGTG_1_-_147774845_147774916@2.31.30,tr
ccgtgatcgtatagtggttagtactctgcg

SEQ ID NO: 2737 - DNA, 16 bp, homo sapiens
  tDNAMT_GluTTC_MT_-_14674_14742@57.72.16,tDNAlooka
ccgtgcgagaatacca

SEQ ID NO: 2738 - DNA, 19 bp, homo sapiens
  tDNA12_ArgCCT_16_+_3243918_3243990@34.52.19,tDNA3
cctaagccagggattgtgg

SEQ ID NO: 2739 - DNA, 20 bp, homo sapiens
  tDNA12_ArgCCT_16_+_3243918_3243990@34.53.20,tDNA3
cctaagccagggattgtggg

SEQ ID NO: 2740 - DNA, 21 bp, homo sapiens
  tDNA12_ArgCCT_16_+_3243918_3243990@34.54.21,tDNA3
cctaagccagggattgtgggt

SEQ ID NO: 2741 - DNA, 16 bp, homo sapiens
  tDNAMT_AspGTC_MT_+_7518_7585@56.71.16
cctatatatcttacca

SEQ ID NO: 2742 - DNA, 19 bp, homo sapiens
  tDNAMT_PheGAA_MT_+_577_647@18.36.19
cctcaaagcaatacactga

SEQ ID NO: 2743 - DNA, 22 bp, homo sapiens
  tDNA23_ArgCCG_17_-_66016013_66016085@31.52.22
cctccggagctggggattgtgg

SEQ ID NO: 2744 - DNA, 17 bp, homo sapiens
  tDNAMT_PheGAA_MT_+_577_647@15.31.17
cctcctcaaagcaatac

SEQ ID NO: 2745 - DNA, 18 bp, homo sapiens
  tDNAMT_PheGAA_MT_+_577_647@15.32.18
cctcctcaaagcaataca

SEQ ID NO: 2746 - DNA, 17 bp, homo sapiens
  tDNA56_ThrTGT_1_+_222638347_222638419@60.76.17
cctcgctggggcctcca

SEQ ID NO: 2747 - DNA, 16 bp, homo sapiens
  tDNA13_LeuTAA_8_-_47740038_47740112@63.78.16,tDNA
cctcttcttaacacca

SEQ ID NO: 2748 - DNA, 16 bp, homo sapiens
  tDNAMT_LysTTT_MT_+_8295_8364@57.72.16,tDNAlookali
cctctttacagtgacc

SEQ ID NO: 2749 - DNA, 17 bp, homo sapiens
  tDNAMT_LysTTT_MT_+_8295_8364@57.73.17,tDNAlookali
cctctttacagtgacca

SEQ ID NO: 2750 - DNA, 16 bp, homo sapiens
  tDNAMT_TyrGTA_MT_-_5826_5891@54.69.16
cctctttttaccacca

SEQ ID NO: 2751 - DNA, 19 bp, homo sapiens
  tDNA25_GlyGCC_16_-_70812114_70812184@30.48.19,trn
cctgccacgcgggaggccc

SEQ ID NO: 2752 - DNA, 20 bp, homo sapiens
  tDNA25_GlyGCC_16_-_70812114_70812184@30.49.20,trn
cctgccacgcgggaggcccg

SEQ ID NO: 2753 - DNA, 21 bp, homo sapiens
  tDNA25_GlyGCC_16_-_70812114_70812184@30.50.21,trn
cctgccacgcgggaggcccgg

SEQ ID NO: 2754 - DNA, 23 bp, homo sapiens
  tDNA25_GlyGCC_16_-_70812114_70812184@30.52.23,trn
cctgccacgcgggaggcccgggt

SEQ ID NO: 2755 - DNA, 16 bp, homo sapiens
  tDNA145_SerAGA_6_-_27521192_27521273@70.85.16,trn
cctgccgactacgcca

SEQ ID NO: 2756 - DNA, 16 bp, homo sapiens
  tDNA137_SerCGA_6_-_27640229_27640310@70.85.16,trn
cctgctcacagcgcca

SEQ ID NO: 2757 - DNA, 16 bp, homo sapiens
  tDNA2_SerTGA_10_+_69524261_69524342@70.85.16
cctgctcgctgcgcca

SEQ ID NO: 2758 - DNA, 29 bp, homo sapiens
  tDNA40_ThrAGT_17_-_8042770_8042843@49.77.29,tDNA3
cctgggttcgaatcccagcggtgcctcca

SEQ ID NO: 2759 - DNA, 30 bp, homo sapiens
  tDNA59_GluCTC_1_+_249168447_249168518@3.32.30,trn
cctggtggtctagtggttaggattcggcgc

SEQ ID NO: 2760 - DNA, 28 bp, homo sapiens
  tDNA15_PheGAA_11_-_59324970_59325042@49.76.28,trn
cctggttcgatcccgggtttcggcacca

SEQ ID NO: 2761 - DNA, 24 bp, homo sapiens
  tDNA5_GluTTC_13_-_41634874_41634945@27.50.24,tDNA
cctggttttcacccaggtggcccg

SEQ ID NO: 2762 - DNA, 25 bp, homo sapiens
  tDNA5_GluTTC_13_-_41634874_41634945@27.51.25,tDNA
cctggttttcacccaggtggcccgg

SEQ ID NO: 2763 - DNA, 20 bp, homo sapiens
  tDNA6_AspGTC_9_-_77517990_77518061@31.50.20,tDNA6
cctgtcacgcgggagaccgg

SEQ ID NO: 2764 - DNA, 23 bp, homo sapiens
  tDNA6_AspGTC_9_-_77517990_77518061@31.53.23,tDNA6
cctgtcacgcgggagaccggggt

SEQ ID NO: 2765 - DNA, 16 bp, homo sapiens
  tDNA2_SerCGA_12_+_56584148_56584229@70.85.16
cctgttcgtgacgcca

SEQ ID NO: 2766 - DNA, 19 bp, homo sapiens
  tDNA82_GlyTCC_1_-_161409961_161410032@31.49.19,tr
ccttccaagcagttgaccc

SEQ ID NO: 2767 - DNA, 20 bp, homo sapiens
  tDNA82_GlyTCC_1_-_161409961_161410032@31.50.20,tr
ccttccaagcagttgacccg

SEQ ID NO: 2768 - DNA, 21 bp, homo sapiens
  tDNA82_GlyTCC_1_-_161409961_161410032@31.51.21,tr
ccttccaagcagttgacccgg

SEQ ID NO: 2769 - DNA, 23 bp, homo sapiens
  tDNA10_GlyTCC_17_+_8124866_8124937@31.53.23,tDNA1
ccttccaagcagttgacccgggt

SEQ ID NO: 2770 - DNA, 24 bp, homo sapiens
  tDNA10_GlyTCC_17_+_8124866_8124937@31.54.24,tDNA1
ccttccaagcagttgacccgggtt

SEQ ID NO: 2771 - DNA, 16 bp, homo sapiens
  tDNAMT_MetCAT_MT_+_4402_4469@56.71.16
ccttcccgtactacca

SEQ ID NO: 2772 - DNA, 16 bp, homo sapiens
  tDNA32_SerTGA_17_-_22028179_22028247@57.72.16,trn
ccttccttttttgcca

SEQ ID NO: 2773 - DNA, 19 bp, homo sapiens
  tDNA19_TyrGTA_14_-_21121258_21121351@1.19.19,tDNA
ccttcgatagctcagctgg

SEQ ID NO: 2774 - DNA, 22 bp, homo sapiens
  tDNA19_TyrGTA_14_-_21121258_21121351@1.22.22,tDNA
ccttcgatagctcagctggtag

SEQ ID NO: 2775 - DNA, 23 bp, homo sapiens
  tDNA19_TyrGTA_14_-_21121258_21121351@1.23.23,tDNA
ccttcgatagctcagctggtaga

SEQ ID NO: 2776 - DNA, 24 bp, homo sapiens
  tDNA19_TyrGTA_14_-_21121258_21121351@1.24.24,tDNA
ccttcgatagctcagctggtagag

SEQ ID NO: 2777 - DNA, 25 bp, homo sapiens
  tDNA19_TyrGTA_14_-_21121258_21121351@1.25.25,tDNA
ccttcgatagctcagctggtagagc

SEQ ID NO: 2778 - DNA, 19 bp, homo sapiens
  tDNA14_TyrGTA_6_+_26569086_26569176@1.19.19,tDNA1
ccttcgatagctcagttgg

SEQ ID NO: 2779 - DNA, 22 bp, homo sapiens
  tDNA14_TyrGTA_6_+_26569086_26569176@1.22.22,tDNA1
ccttcgatagctcagttggtag

SEQ ID NO: 2780 - DNA, 23 bp, homo sapiens
  tDNA14_TyrGTA_6_+_26569086_26569176@1.23.23,tDNA1
ccttcgatagctcagttggtaga

SEQ ID NO: 2781 - DNA, 25 bp, homo sapiens
  tDNA14_TyrGTA_6_+_26569086_26569176@1.25.25,tDNA1
ccttcgatagctcagttggtagagc

SEQ ID NO: 2782 - DNA, 19 bp, homo sapiens
  tDNAMT_ThrTGT_MT_+_15888_15953@51.69.19
cctttttccaaggacacca

SEQ ID NO: 2783 - DNA, 21 bp, homo sapiens
  tDNA32_MetCAT_1_+_153643726_153643797@55.75.21,tr
cgaaaccatcctctgctacca

SEQ ID NO: 2784 - DNA, 21 bp, homo sapiens
  tDNA136_ValAAC_6_-_27648885_27648957@56.76.21,trn
cgaaaccgggcggaaacacca

SEQ ID NO: 2785 - DNA, 21 bp, homo sapiens
  tDNA6_TrpCCA_12_+_98898030_98898101@55.75.21
cgaatcacgtcggggtcacca

SEQ ID NO: 2786 - DNA, 21 bp, homo sapiens
  tDNA4_ArgTCT_17_+_8024243_8024330@56.76.21
cgaatcccaccagagtcgcca

SEQ ID NO: 2787 - DNA, 21 bp, homo sapiens
  tDNA1_LeuAAG_14_+_21078291_21078372@65.85.21,tDNA
cgaatcccaccgctgccacca

SEQ ID NO: 2788 - DNA, 21 bp, homo sapiens
  tDNA34_LeuCAG_1_+_161411323_161411405@66.86.21,tr
cgaatcccactcctgacacca

SEQ ID NO: 2789 - DNA, 21 bp, homo sapiens
  tDNA17_LeuCAG_16_+_57333863_57333945@66.86.21,trn
cgaatcccacttctgacacca

SEQ ID NO: 2790 - DNA, 21 bp, homo sapiens
  tDNA40_ThrAGT_17_-_8042770_8042843@57.77.21,tDNA3
cgaatcccagcggtgcctcca

SEQ ID NO: 2791 - DNA, 21 bp, homo sapiens
  tDNA127_ThrTGT_6_-_28442329_28442402@57.77.21
cgaatcccagtagagcctcca

SEQ ID NO: 2792 - DNA, 21 bp, homo sapiens
  tDNA175_SerGCT_6_-_26305718_26305801@67.87.21,trn
cgaatcccatcctcgtcgcca

SEQ ID NO: 2793 - DNA, 21 bp, homo sapiens
  tDNA106_HisGTG_1_-_149155828_149155899@55.75.21,t
cgaatccgagtcacggcacca

SEQ ID NO: 2794 - DNA, 20 bp, homo sapiens
  tDNA14_TyrGTA_6_+_26569086_26569176@56.75.20,tDNA
cgaatccggctcgaaggacc

SEQ ID NO: 2795 - DNA, 21 bp, homo sapiens
  tDNA14_TyrGTA_6_+_26569086_26569176@56.76.21,tDNA
cgaatccggctcgaaggacca

SEQ ID NO: 2796 - DNA, 21 bp, homo sapiens
  tDNA16_TyrGTA_6_+_26577332_26577420@56.76.21,tDNA
cgaatccggctcggaggacca

SEQ ID NO: 2797 - DNA, 21 bp, homo sapiens
  tDNA145_SerAGA_6_-_27521192_27521273@65.85.21,trn
cgaatcctgccgactacgcca

SEQ ID NO: 2798 - DNA, 18 bp, homo sapiens
  tDNAMT_HisGTG_MT_+_12138_12206@54.71.18
cgaccccttatttacccc

SEQ ID NO: 2799 - DNA, 19 bp, homo sapiens
  tDNAMT_HisGTG_MT_+_12138_12206@54.72.19
cgaccccttatttacccca

SEQ ID NO: 2800 - DNA, 21 bp, homo sapiens
  tDNA3_GluTTC_13_-_45492062_45492133@55.75.21,tDNA
cgactcccggtgtgggaacca

SEQ ID NO: 2801 - DNA, 21 bp, homo sapiens
  tDNA11_ArgACG_3_-_45730491_45730563@56.76.21,tDNA
cgactcctggctggctcgcca

SEQ ID NO: 2802 - DNA, 21 bp, homo sapiens
  tDNA16_ValTAC_11_-_59318460_59318532@56.76.21,trn
cgagccccagtggaaccacca

SEQ ID NO: 2803 - DNA, 21 bp, homo sapiens
  tDNA3_ArgTCT_11_+_59318767_59318852@56.76.21,tDNA
cgagtcccaccagagtcgcca

SEQ ID NO: 2804 - DNA, 21 bp, homo sapiens
  tDNA4_ArgTCG_15_+_89878304_89878376@56.76.21
cgagtcctgccgcggtcgcca

SEQ ID NO: 2805 - DNA, 21 bp, homo sapiens
  tDNA112_GlnCTG_1_-_147737382_147737453@55.75.21,t
cgagtctcggtggaacctcca

SEQ ID NO: 2806 - DNA, 21 bp, homo sapiens
  tDNA120_AlaAGC_6_-_28626014_28626085@55.75.21
cgatccccagcatctccacca

SEQ ID NO: 2807 - DNA, 21 bp, homo sapiens
  tDNA108_AlaAGC_6_-_28763741_28763812@55.75.21
cgatccccagtacctccacca

SEQ ID NO: 2808 - DNA, 21 bp, homo sapiens
  tDNA113_AlaTGC_6_-_28726141_28726212@55.75.21,trn
cgatccccggcacctccacca

SEQ ID NO: 2809 - DNA, 21 bp, homo sapiens
  tDNA119_AlaCGC_6_-_28641613_28641684@55.75.21,trn
cgatccccggcatctccacca

SEQ ID NO: 2810 - DNA, 21 bp, homo sapiens
  tDNA15_PheGAA_11_-_59324970_59325042@56.76.21,trn
cgatcccgggtttcggcacca

SEQ ID NO: 2811 - DNA, 21 bp, homo sapiens
  tDNA3_AlaAGC_2_+_27274082_27274154@56.76.21,tDNA6
cgatgcccgcatcctccacca

SEQ ID NO: 2812 - DNA, 21 bp, homo sapiens
  tDNA18_TyrGTA_14_-_21125623_21125716@56.76.21
cgattccagctcgaaggacca

SEQ ID NO: 2813 - DNA, 21 bp, homo sapiens
  tDNA10_GlyTCC_17_+_8124866_8124937@55.75.21,tDNA1
cgattcccggccaacgcacca

SEQ ID NO: 2814 - DNA, 21 bp, homo sapiens
  tDNA68_GlyGCC_1_-_161493637_161493707@54.74.21,tr
cgattcccggccaatgcacca

SEQ ID NO: 2815 - DNA, 21 bp, homo sapiens
  tDNA34_GlyCCC_16_-_686736_686806@54.74.21,tDNA27_
cgattcccgggcggcgcacca

SEQ ID NO: 2816 - DNA, 21 bp, homo sapiens
  tDNA92_PheGAA_1_-_149672905_149672976@55.75.21,tr
cgattcccggtcagggaacca

SEQ ID NO: 2817 - DNA, 20 bp, homo sapiens
  tDNA19_TyrGTA_14_-_21121258_21121351@56.75.20,trn
cgattccggctcgaaggacc

SEQ ID NO: 2818 - DNA, 21 bp, homo sapiens
  tDNA19_TyrGTA_14_-_21121258_21121351@56.76.21,trn
cgattccggctcgaaggacca

SEQ ID NO: 2819 - DNA, 21 bp, homo sapiens
  tDNAMT_SerTGA_MT_-_7446_7514@52.72.21,tDNAlookali
cgattccttccttttttgcca

SEQ ID NO: 2820 - DNA, 21 bp, homo sapiens
  tDNAMT_GlnTTG_MT_-_4329_4400@55.75.21,tDNAlookali
cgattctcatagtcctagcca

SEQ ID NO: 2821 - DNA, 30 bp, homo sapiens
  tDNA59_GluCTC_1_+_249168447_249168518@39.68.30,tr
cgccgcggcccgggttcgattcccggtcag

SEQ ID NO: 2822 - DNA, 23 bp, homo sapiens
  tDNA111_HisGTG_1_-_147774845_147774916@-1C.22.23,
cgccgtgatcgtatagtggttag

SEQ ID NO: 2823 - DNA, 24 bp, homo sapiens
  tDNA111_HisGTG_1_-_147774845_147774916@-1C.23.24,
cgccgtgatcgtatagtggttagt

SEQ ID NO: 2824 - DNA, 30 bp, homo sapiens
  tDNAMT_ThrTGT_MT_+_15888_15953@39.68.30
cggagatgaaaacctttttccaaggacacc

SEQ ID NO: 2825 - DNA, 17 bp, homo sapiens
  tDNA23_ArgCCG_17_-_66016013_66016085@35.51.17
cggagctggggattgtg

SEQ ID NO: 2826 - DNA, 18 bp, homo sapiens
  tDNA23_ArgCCG_17_-_66016013_66016085@35.52.18
cggagctggggattgtgg

SEQ ID NO: 2827 - DNA, 19 bp, homo sapiens
  tDNA23_ArgCCG_17_-_66016013_66016085@35.53.19
cggagctggggattgtggg

SEQ ID NO: 2828 - DNA, 20 bp, homo sapiens
  tDNA23_ArgCCG_17_-_66016013_66016085@35.54.20
cggagctggggattgtgggt

SEQ ID NO: 2829 - DNA, 21 bp, homo sapiens
  tDNA23_ArgCCG_17_-_66016013_66016085@35.55.21
cggagctggggattgtgggtt

SEQ ID NO: 2830 - DNA, 19 bp, homo sapiens
  tDNA5_LysTTT_11_+_59323902_59323974@4.22.19,tDNA5
cggatagctcagtcggtag

SEQ ID NO: 2831 - DNA, 20 bp, homo sapiens
  tDNA5_LysTTT_11_+_59323902_59323974@4.23.20,tDNA5
cggatagctcagtcggtaga

SEQ ID NO: 2832 - DNA, 21 bp, homo sapiens
  tDNA5_LysTTT_11_+_59323902_59323974@4.24.21,tDNA5
cggatagctcagtcggtagag

SEQ ID NO: 2833 - DNA, 22 bp, homo sapiens
  tDNA5_LysTTT_11_+_59323902_59323974@4.25.22,tDNA5
cggatagctcagtcggtagagc

SEQ ID NO: 2834 - DNA, 20 bp, homo sapiens
  tDNA1_ArgCCG_16_+_3200675_3200747@35.54.20,tDNA11
cggatcagaagattgagggt

SEQ ID NO: 2835 - DNA, 17 bp, homo sapiens
  tDNA58_LeuCAA_1_+_249168054_249168159@49.65.17
cggatggaggcgtgggt

SEQ ID NO: 2836 - DNA, 27 bp, homo sapiens
  tDNA10_LysCTT_16_+_3241501_3241573@4.30.27,tDNA13
cggctagctcagtcggtagagcatggg

SEQ ID NO: 2837 - DNA, 28 bp, homo sapiens
  tDNA10_LysCTT_16_+_3241501_3241573@4.31.28,tDNA13
cggctagctcagtcggtagagcatggga

SEQ ID NO: 2838 - DNA, 30 bp, homo sapiens
  tDNA144_AspGTC_6_-_27551236_27551307@40.69.30,trn
cgggagaccggggttcgattccccgacggg

SEQ ID NO: 2839 - DNA, 27 bp, homo sapiens
  tDNAMT_PheGAA_MT_+_577_647@48.74.27
cgggctcacatcaccccataaacacca

SEQ ID NO: 2840 - DNA, 27 bp, homo sapiens
  tDNA5_GluTTC_13_-_41634874_41634945@49.75.27,tDNA
cgggttcgactcccggtatgggaacca

SEQ ID NO: 2841 - DNA, 27 bp, homo sapiens
  tDNA3_GluTTC_13_-_45492062_45492133@49.75.27,tDNA
cgggttcgactcccggtgtgggaacca

SEQ ID NO: 2842 - DNA, 27 bp, homo sapiens
  tDNA119_AlaCGC_6_-_28641613_28641684@49.75.27,trn
cgggttcgatccccggcatctccacca

SEQ ID NO: 2843 - DNA, 27 bp, homo sapiens
  tDNA92_PheGAA_1_-_149672905_149672976@49.75.27,tr
cgggttcgattcccggtcagggaacca

SEQ ID NO: 2844 - DNA, 16 bp, homo sapiens
  tDNA149_LysTTT_6_-_27302769_27302841@17.32.16,trn
cggtagagcatcagac

SEQ ID NO: 2845 - DNA, 19 bp, homo sapiens
  tDNA6_TrpCCA_12_+_98898030_98898101@16.34.19,tDNA
cggtagcgcgtctgactcc

SEQ ID NO: 2846 - DNA, 17 bp, homo sapiens
  tDNA17_LeuCAG_16_+_57333863_57333945@16.32.17,trn
cggtctaaggcgctgcg

SEQ ID NO: 2847 - DNA, 17 bp, homo sapiens
  tDNA78_LeuAAG_6_+_28956779_28956860@16.32.17,tDNA
cggtctaaggcgctgga

SEQ ID NO: 2848 - DNA, 16 bp, homo sapiens
  tDNA3_GluTTC_13_-_45492062_45492133@16.31.16,tDNA
cggttaggattcctgg

SEQ ID NO: 2849 - DNA, 17 bp, homo sapiens
  tDNA3_GluTTC_13_-_45492062_45492133@16.32.17,tDNA
cggttaggattcctggt

SEQ ID NO: 2850 - DNA, 18 bp, homo sapiens
  tDNA3_GluTTC_13_-_45492062_45492133@16.33.18,tDNA
cggttaggattcctggtt

SEQ ID NO: 2851 - DNA, 22 bp, homo sapiens
  tDNA3_GluTTC_13_-_45492062_45492133@16.37.22,tDNA
cggttaggattcctggttttca

SEQ ID NO: 2852 - DNA, 23 bp, homo sapiens
  tDNA3_GluTTC_13_-_45492062_45492133@16.38.23,tDNA
cggttaggattcctggttttcac

SEQ ID NO: 2853 - DNA, 24 bp, homo sapiens
  tDNA3_GluTTC_13_-_45492062_45492133@16.39.24,tDNA
cggttaggattcctggttttcacc

SEQ ID NO: 2854 - DNA, 16 bp, homo sapiens
  tDNA145_SerAGA_6_-_27521192_27521273@-1C.15.16,tr
cgtagtcgtggccgag

SEQ ID NO: 2855 - DNA, 19 bp, homo sapiens
  tDNA145_SerAGA_6_-_27521192_27521273@-1C.18.19,tr
cgtagtcgtggccgagtgg

SEQ ID NO: 2856 - DNA, 27 bp, homo sapiens
  tDNA136_ValAAC_6_-_27648885_27648957@6.32.27,tDNA
cgtagtgtagtggttatcacgttcgcc

SEQ ID NO: 2857 - DNA, 21 bp, homo sapiens
  tDNA106_HisGTG_1_-_149155828_149155899@9.29.21,tr
cgtatagtggttagtactctg

SEQ ID NO: 2858 - DNA, 22 bp, homo sapiens
  tDNA106_HisGTG_1_-_149155828_149155899@9.30.22,tr
cgtatagtggttagtactctgc

SEQ ID NO: 2859 - DNA, 23 bp, homo sapiens
  tDNA106_HisGTG_1_-_149155828_149155899@9.31.23,tr
cgtatagtggttagtactctgcg

SEQ ID NO: 2860 - DNA, 24 bp, homo sapiens
  tDNA111_HisGTG_1_-_147774845_147774916@9.32.24,tr
cgtatagtggttagtactctgcgt

SEQ ID NO: 2861 - DNA, 25 bp, homo sapiens
  tDNA111_HisGTG_1_-_147774845_147774916@9.33.25,tr
cgtatagtggttagtactctgcgtt

SEQ ID NO: 2862 - DNA, 26 bp, homo sapiens
  tDNA111_HisGTG_1_-_147774845_147774916@9.34.26,tr
cgtatagtggttagtactctgcgttg

SEQ ID NO: 2863 - DNA, 27 bp, homo sapiens
  tDNA111_HisGTG_1_-_147774845_147774916@9.35.27,tr
cgtatagtggttagtactctgcgttgt

SEQ ID NO: 2864 - DNA, 17 bp, homo sapiens
  tDNA8_AlaTGC_12_+_125424512_125424583@37.53.17
cgtatgaggccccgggt

SEQ ID NO: 2865 - DNA, 16 bp, homo sapiens
  tDNA111_HisGTG_1_-_147774845_147774916@3.18.16,tr
cgtgatcgtatagtgg

SEQ ID NO: 2866 - DNA, 17 bp, homo sapiens
  tDNA111_HisGTG_1_-_147774845_147774916@3.19.17,tr
cgtgatcgtatagtggt

SEQ ID NO: 2867 - DNA, 20 bp, homo sapiens
  tDNA111_HisGTG_1_-_147774845_147774916@3.22.20,tr
cgtgatcgtatagtggttag

SEQ ID NO: 2868 - DNA, 21 bp, homo sapiens
  tDNA111_HisGTG_1_-_147774845_147774916@3.23.21,tr
cgtgatcgtatagtggttagt

SEQ ID NO: 2869 - DNA, 22 bp, homo sapiens
  tDNA111_HisGTG_1_-_147774845_147774916@3.24.22,tr
cgtgatcgtatagtggttagta

SEQ ID NO: 2870 - DNA, 25 bp, homo sapiens
  tDNA111_HisGTG_1_-_147774845_147774916@3.27.25,tr
cgtgatcgtatagtggttagtactc

SEQ ID NO: 2871 - DNA, 26 bp, homo sapiens
  tDNA111_HisGTG_1_-_147774845_147774916@3.28.26,tr
cgtgatcgtatagtggttagtactct

SEQ ID NO: 2872 - DNA, 27 bp, homo sapiens
  tDNA111_HisGTG_1_-_147774845_147774916@3.29.27,tr
cgtgatcgtatagtggttagtactctg

SEQ ID NO: 2873 - DNA, 28 bp, homo sapiens
  tDNA111_HisGTG_1_-_147774845_147774916@3.30.28,tr
cgtgatcgtatagtggttagtactctgc

SEQ ID NO: 2874 - DNA, 30 bp, homo sapiens
  tDNA111_HisGTG_1_-_147774845_147774916@3.32.30,tr
cgtgatcgtatagtggttagtactctgcgt

SEQ ID NO: 2875 - DNA, 29 bp, homo sapiens
  tDNA10_LysCTT_16_+_3241501_3241573@48.76.29,tDNA3
cgtgggttcgagccccacgttgggcgcca

SEQ ID NO: 2876 - DNA, 18 bp, homo sapiens
  tDNAMT_GluTTC_MT_-_14674_14742@45.62.18,tDNAlooka
cgtggttgtagtccgtgc

SEQ ID NO: 2877 - DNA, 22 bp, homo sapiens
  tDNAMT_GluTTC_MT_-_14674_14742@45.66.22,tDNAlooka
cgtggttgtagtccgtgcgaga

SEQ ID NO: 2878 - DNA, 25 bp, homo sapiens
  tDNAMT_GluTTC_MT_-_14674_14742@45.69.25,tDNAlooka
cgtggttgtagtccgtgcgagaata

SEQ ID NO: 2879 - DNA, 26 bp, homo sapiens
  tDNAMT_GluTTC_MT_-_14674_14742@45.70.26,tDNAlooka
cgtggttgtagtccgtgcgagaatac

SEQ ID NO: 2880 - DNA, 27 bp, homo sapiens
  tDNAMT_GluTTC_MT_-_14674_14742@45.71.27,tDNAlooka
cgtggttgtagtccgtgcgagaatacc

SEQ ID NO: 2881 - DNA, 28 bp, homo sapiens
  tDNAMT_GluTTC_MT_-_14674_14742@45.72.28,tDNAlooka
cgtggttgtagtccgtgcgagaatacca

SEQ ID NO: 2882 - DNA, 18 bp, homo sapiens
  tDNA17_LeuCAG_16_+_57333863_57333945@31.48.18,trn
cgttcaggtcgcagtctc

SEQ ID NO: 2883 - DNA, 19 bp, homo sapiens
  tDNA17_LeuCAG_16_+_57333863_57333945@31.49.19,trn
cgttcaggtcgcagtctcc

SEQ ID NO: 2884 - DNA, 20 bp, homo sapiens
  tDNA17_LeuCAG_16_+_57333863_57333945@31.50.20,trn
cgttcaggtcgcagtctccc

SEQ ID NO: 2885 - DNA, 23 bp, homo sapiens
  tDNA65_ProAGG_1_-_167684725_167684796@5.27.23,trn
cgttggtctaggggtatgattct

SEQ ID NO: 2886 - DNA, 20 bp, homo sapiens
  tDNAMT_MetCAT_MT_+_4402_4469@12.31.20
ctaaataagctatcgggccc

SEQ ID NO: 2887 - DNA, 22 bp, homo sapiens
  tDNAMT_AspGTC_MT_+_7518_7585@50.71.22
ctaaatcctatatatcttacca

SEQ ID NO: 2888 - DNA, 17 bp, homo sapiens
  tDNAMT_SerGCT_MT_+_12207_12265@40.56.17
ctaacaacatggctttc

SEQ ID NO: 2889 - DNA, 18 bp, homo sapiens
  tDNAMT_SerGCT_MT_+_12207_12265@40.57.18
ctaacaacatggctttct

SEQ ID NO: 2890 - DNA, 20 bp, homo sapiens
  tDNAMT_SerGCT_MT_+_12207_12265@40.59.20
ctaacaacatggctttctca

SEQ ID NO: 2891 - DNA, 21 bp, homo sapiens
  tDNAMT_SerGCT_MT_+_12207_12265@40.60.21
ctaacaacatggctttctcac

SEQ ID NO: 2892 - DNA, 22 bp, homo sapiens
  tDNAMT_SerGCT_MT_+_12207_12265@40.61.22
ctaacaacatggctttctcacc

SEQ ID NO: 2893 - DNA, 23 bp, homo sapiens
  tDNAMT_SerGCT_MT_+_12207_12265@40.62.23
ctaacaacatggctttctcacca

SEQ ID NO: 2894 - DNA, 16 bp, homo sapiens
  tDNA12_ArgCCT_16_+_3243918_3243990@35.50.16,tDNA3
ctaagccagggattgt

SEQ ID NO: 2895 - DNA, 17 bp, homo sapiens
  tDNA12_ArgCCT_16_+_3243918_3243990@35.51.17,tDNA3
ctaagccagggattgtg

SEQ ID NO: 2896 - DNA, 18 bp, homo sapiens
  tDNA12_ArgCCT_16_+_3243918_3243990@35.52.18,tDNA3
ctaagccagggattgtgg

SEQ ID NO: 2897 - DNA, 19 bp, homo sapiens
  tDNA12_ArgCCT_16_+_3243918_3243990@35.53.19,tDNA3
ctaagccagggattgtggg

SEQ ID NO: 2898 - DNA, 20 bp, homo sapiens
  tDNA12_ArgCCT_16_+_3243918_3243990@35.54.20,tDNA3
ctaagccagggattgtgggt

SEQ ID NO: 2899 - DNA, 21 bp, homo sapiens
  tDNA12_ArgCCT_16_+_3243918_3243990@35.55.21,tDNA3
ctaagccagggattgtgggtt

SEQ ID NO: 2900 - DNA, 22 bp, homo sapiens
  tDNA12_ArgCCT_16_+_3243918_3243990@35.56.22,tDNA3
ctaagccagggattgtgggttc

SEQ ID NO: 2901 - DNA, 23 bp, homo sapiens
  tDNA12_ArgCCT_16_+_3243918_3243990@35.57.23,tDNA3
ctaagccagggattgtgggttcg

SEQ ID NO: 2902 - DNA, 29 bp, homo sapiens
  tDNA3_ArgCCT_7_+_139025446_139025518@35.63.29,trn
ctaagccagggattgtgggttcgagtccc

SEQ ID NO: 2903 - DNA, 18 bp, homo sapiens
  tDNA21_ArgCCT_17_-_73030526_73030598@12.29.18,trn
ctaatggataaggcactg

SEQ ID NO: 2904 - DNA, 20 bp, homo sapiens
  tDNAMT_ProTGG_MT_-_15956_16023@38.57.20
ctaatggtggagttaaagac

SEQ ID NO: 2905 - DNA, 20 bp, homo sapiens
  tDNA3_GluTTC_13_-_45492062_45492133@12.31.20,tDNA
ctagcggttaggattcctgg

SEQ ID NO: 2906 - DNA, 21 bp, homo sapiens
  tDNA25_GluCTC_2_-_71273488_71273560@12.32.21,tDNA
ctagtggttaggattcggcgc

SEQ ID NO: 2907 - DNA, 25 bp, homo sapiens
  tDNA25_GluCTC_2_-_71273488_71273560@12.36.25,tDNA
ctagtggttaggattcggcgctctc

SEQ ID NO: 2908 - DNA, 28 bp, homo sapiens
  tDNA59_GluCTC_1_+_249168447_249168518@12.39.28,tr
ctagtggttaggattcggcgctctcacc

SEQ ID NO: 2909 - DNA, 17 bp, homo sapiens
  tDNAMT_LeuTAG_MT_+_12266_12336@19.35.17
ctatccattggtcttag

SEQ ID NO: 2910 - DNA, 19 bp, homo sapiens
  tDNAMT_LeuTAG_MT_+_12266_12336@19.37.19
ctatccattggtcttaggc

SEQ ID NO: 2911 - DNA, 21 bp, homo sapiens
  tDNAMT_LeuTAG_MT_+_12266_12336@19.39.21
ctatccattggtcttaggccc

SEQ ID NO: 2912 - DNA, 16 bp, homo sapiens
  tDNA141_LeuCAA_6_-_27570348_27570454@33.48.16,trn
ctcaagttctggtctc

SEQ ID NO: 2913 - DNA, 17 bp, homo sapiens
  tDNA141_LeuCAA_6_-_27570348_27570454@33.49.17,trn
ctcaagttctggtctcc

SEQ ID NO: 2914 - DNA, 18 bp, homo sapiens
  tDNA100_LeuCAA_6_-_28864000_28864105@33.50.18,trn
ctcaagttctggtctcca

SEQ ID NO: 2915 - DNA, 19 bp, homo sapiens
  tDNA58_LeuCAA_1_+_249168054_249168159@33.51.19
ctcaagttctggtctccgg

SEQ ID NO: 2916 - DNA, 20 bp, homo sapiens
  tDNA58_LeuCAA_1_+_249168054_249168159@33.52.20
ctcaagttctggtctccgga

SEQ ID NO: 2917 - DNA, 17 bp, homo sapiens
  tDNAMT_SerGCT_MT_+_12207_12265@8.24.17
ctcacaagaactgctaa

SEQ ID NO: 2918 - DNA, 18 bp, homo sapiens
  tDNAMT_SerGCT_MT_+_12207_12265@8.25.18
ctcacaagaactgctaac

SEQ ID NO: 2919 - DNA, 19 bp, homo sapiens
  tDNAMT_SerGCT_MT_+_12207_12265@8.26.19
ctcacaagaactgctaact

SEQ ID NO: 2920 - DNA, 20 bp, homo sapiens
  tDNAMT_SerGCT_MT_+_12207_12265@8.27.20
ctcacaagaactgctaactc

SEQ ID NO: 2921 - DNA, 21 bp, homo sapiens
  tDNAMT_SerGCT_MT_+_12207_12265@8.28.21
ctcacaagaactgctaactca

SEQ ID NO: 2922 - DNA, 23 bp, homo sapiens
  tDNAMT_SerGCT_MT_+_12207_12265@8.30.23
ctcacaagaactgctaactcatg

SEQ ID NO: 2923 - DNA, 24 bp, homo sapiens
  tDNAMT_SerGCT_MT_+_12207_12265@8.31.24
ctcacaagaactgctaactcatgc

SEQ ID NO: 2924 - DNA, 25 bp, homo sapiens
  tDNAMT_SerGCT_MT_+_12207_12265@8.32.25
ctcacaagaactgctaactcatgcc

SEQ ID NO: 2925 - DNA, 19 bp, homo sapiens
  tDNA157_ValCAC_6_-_27173867_27173939@32.50.19,trn
ctcacacgcgaaaggtccc

SEQ ID NO: 2926 - DNA, 20 bp, homo sapiens
  tDNA157_ValCAC_6_-_27173867_27173939@32.51.20,trn
ctcacacgcgaaaggtcccc

SEQ ID NO: 2927 - DNA, 23 bp, homo sapiens
  tDNA157_ValCAC_6_-_27173867_27173939@32.54.23,trn
ctcacacgcgaaaggtccccggt

SEQ ID NO: 2928 - DNA, 16 bp, homo sapiens
  tDNA22_MetCAT_16_-_87417628_87417700@61.76.16,trn
ctcacacggggcacca

SEQ ID NO: 2929 - DNA, 17 bp, homo sapiens
  tDNAMT_PheGAA_MT_+_577_647@52.68.17
ctcacatcaccccataa

SEQ ID NO: 2930 - DNA, 18 bp, homo sapiens
  tDNAMT_PheGAA_MT_+_577_647@52.69.18
ctcacatcaccccataaa

SEQ ID NO: 2931 - DNA, 19 bp, homo sapiens
  tDNAMT_PheGAA_MT_+_577_647@52.70.19
ctcacatcaccccataaac

SEQ ID NO: 2932 - DNA, 20 bp, homo sapiens
  tDNAMT_PheGAA_MT_+_577_647@52.71.20
ctcacatcaccccataaaca

SEQ ID NO: 2933 - DNA, 22 bp, homo sapiens
  tDNAMT_PheGAA_MT_+_577_647@52.73.22
ctcacatcaccccataaacacc

SEQ ID NO: 2934 - DNA, 23 bp, homo sapiens
  tDNAMT_PheGAA_MT_+_577_647@52.74.23
ctcacatcaccccataaacacca

SEQ ID NO: 2935 - DNA, 16 bp, homo sapiens
  tDNA59_GluCTC_1_+_249168447_249168518@34.49.16,tr
ctcaccgccgcggccc

SEQ ID NO: 2936 - DNA, 17 bp, homo sapiens
  tDNA59_GluCTC_1_+_249168447_249168518@34.50.17,tr
ctcaccgccgcggcccg

SEQ ID NO: 2937 - DNA, 20 bp, homo sapiens
  tDNA59_GluCTC_1_+_249168447_249168518@34.53.20,tr
ctcaccgccgcggcccgggt

SEQ ID NO: 2938 - DNA, 30 bp, homo sapiens
  tDNA59_GluCTC_1_+_249168447_249168518@34.63.30,tr
ctcaccgccgcggcccgggttcgattcccg

SEQ ID NO: 2939 - DNA, 16 bp, homo sapiens
  tDNA29_IleTAT_6_+_26988125_26988218@62.77.16,tDNA
ctcacctggagcacca

SEQ ID NO: 2940 - DNA, 16 bp, homo sapiens
  tDNA1_LeuCAA_11_+_9296790_9296863@62.77.16,tDNA75
ctcagagggggcacca

SEQ ID NO: 2941 - DNA, 22 bp, homo sapiens
  tDNA149_LysTTT_6_-_27302769_27302841@11.32.22,trn
ctcagtcggtagagcatcagac

SEQ ID NO: 2942 - DNA, 20 bp, homo sapiens
  tDNA7_CysGCA_3_-_131947944_131948015@11.30.20,trn
ctcagtggtagagcatttga

SEQ ID NO: 2943 - DNA, 24 bp, homo sapiens
  tDNA7_CysGCA_3_-_131947944_131948015@11.34.24,trn
ctcagtggtagagcatttgactgc

SEQ ID NO: 2944 - DNA, 23 bp, homo sapiens
  tDNA21_MetCAT_6_+_26701712_26701784@32.54.23,tDNA
ctcataatctgaaggtcctgagt

SEQ ID NO: 2945 - DNA, 23 bp, homo sapiens
  tDNA22_MetCAT_16_-_87417628_87417700@32.54.23,trn
ctcataatctgaaggtcgtgagt

SEQ ID NO: 2946 - DNA, 16 bp, homo sapiens
  tDNAMT_GlnTTG_MT_-_4329_4400@60.75.16,tDNAlookali
ctcatagtcctagcca

SEQ ID NO: 2947 - DNA, 28 bp, homo sapiens
  tDNAMT_SerGCT_MT_+_12207_12265@25.52.28
ctcatgcccccatgtctaacaacatggc

SEQ ID NO: 2948 - DNA, 30 bp, homo sapiens
  tDNAMT_SerGCT_MT_+_12207_12265@25.54.30
ctcatgcccccatgtctaacaacatggctt

SEQ ID NO: 2949 - DNA, 18 bp, homo sapiens
  tDNAMT_LeuTAG_MT_+_12266_12336@57.74.18
ctccaaataaaagtacca

SEQ ID NO: 2950 - DNA, 23 bp, homo sapiens
  tDNA6_TrpCCA_12_+_98898030_98898101@31.53.23
ctccagatcagaaggctgcgtgt

SEQ ID NO: 2951 - DNA, 23 bp, homo sapiens
  tDNA1_TrpCCA_7_+_99067307_99067378@31.53.23,tDNA6
ctccagatcagaaggttgcgtgt

SEQ ID NO: 2952 - DNA, 19 bp, homo sapiens
  tDNA126_LeuAAG_6_-_28446400_28446481@39.57.19,trn
ctccagtctcttcgggggc

SEQ ID NO: 2953 - DNA, 22 bp, homo sapiens
  tDNA126_LeuAAG_6_-_28446400_28446481@39.60.22,trn
ctccagtctcttcgggggcgtg

SEQ ID NO: 2954 - DNA, 21 bp, homo sapiens
  tDNAMT_CysGCA_MT_-_5761_5826@3.23.21
ctccgaggtgattttcatatt

SEQ ID NO: 2955 - DNA, 28 bp, homo sapiens
  tDNAMT_CysGCA_MT_-_5761_5826@3.30.28
ctccgaggtgattttcatattgaattgc

SEQ ID NO: 2956 - DNA, 21 bp, homo sapiens
  tDNA23_ArgCCG_17_-_66016013_66016085@32.52.21
ctccggagctggggattgtgg

SEQ ID NO: 2957 - DNA, 23 bp, homo sapiens
  tDNA23_ArgCCG_17_-_66016013_66016085@32.54.23
ctccggagctggggattgtgggt

SEQ ID NO: 2958 - DNA, 17 bp, homo sapiens
  tDNA9_ArgTCT_1_+_94313129_94313213@3.19.17
ctccgtggcgcaatgga

SEQ ID NO: 2959 - DNA, 16 bp, homo sapiens
  tDNAMT_PheGAA_MT_+_577_647@16.31.16
ctcctcaaagcaatac

SEQ ID NO: 2960 - DNA, 17 bp, homo sapiens
  tDNAMT_PheGAA_MT_+_577_647@16.32.17
ctcctcaaagcaataca

SEQ ID NO: 2961 - DNA, 18 bp, homo sapiens
  tDNAMT_PheGAA_MT_+_577_647@16.33.18
ctcctcaaagcaatacac

SEQ ID NO: 2962 - DNA, 18 bp, homo sapiens
  tDNA11_ArgACG_3_-_45730491_45730563@59.76.18,tDNA
ctcctggctggctcgcca

SEQ ID NO: 2963 - DNA, 23 bp, homo sapiens
  tDNA25_GlyGCC_16_-_70812114_70812184@26.48.23,trn
ctcgcctgccacgcgggaggccc

SEQ ID NO: 2964 - DNA, 25 bp, homo sapiens
  tDNA25_GlyGCC_16_-_70812114_70812184@26.50.25,trn
ctcgcctgccacgcgggaggcccgg

SEQ ID NO: 2965 - DNA, 16 bp, homo sapiens
  tDNA13_ThrTGT_5_-_180618687_180618758@60.75.16,tr
ctcgctggggcctcca

SEQ ID NO: 2966 - DNA, 16 bp, homo sapiens
  tDNA42_GlnCTG_6_+_27263212_27263283@60.75.16,tDNA
ctcggtggaacctcca

SEQ ID NO: 2967 - DNA, 16 bp, homo sapiens
  tDNA130_GlnTTG_6_-_27763640_27763711@60.75.16,trn
ctcggtgggacctcca

SEQ ID NO: 2968 - DNA, 21 bp, homo sapiens
  tDNA10_MetCAT_8_-_124169470_124169542@3.23.21
ctcgttagcgcagtaggtagc

SEQ ID NO: 2969 - DNA, 18 bp, homo sapiens
  tDNA59_GluCTC_1_+_249168447_249168518@32.49.18,tr
ctctcaccgccgcggccc

SEQ ID NO: 2970 - DNA, 19 bp, homo sapiens
  tDNA59_GluCTC_1_+_249168447_249168518@32.50.19,tr
ctctcaccgccgcggcccg

SEQ ID NO: 2971 - DNA, 22 bp, homo sapiens
  tDNA59_GluCTC_1_+_249168447_249168518@32.53.22,tr
ctctcaccgccgcggcccgggt

SEQ ID NO: 2972 - DNA, 23 bp, homo sapiens
  tDNA59_GluCTC_1_+_249168447_249168518@32.54.23,tr
ctctcaccgccgcggcccgggtt

SEQ ID NO: 2973 - DNA, 17 bp, homo sapiens
  tDNA131_GlnCTG_6_-_27759135_27759206@32.48.17,trn
ctctgaatccagcgatc

SEQ ID NO: 2974 - DNA, 18 bp, homo sapiens
  tDNA131_GlnCTG_6_-_27759135_27759206@32.49.18,trn
ctctgaatccagcgatcc

SEQ ID NO: 2975 - DNA, 19 bp, homo sapiens
  tDNA131_GlnCTG_6_-_27759135_27759206@32.50.19,trn
ctctgaatccagcgatccg

SEQ ID NO: 2976 - DNA, 20 bp, homo sapiens
  tDNA131_GlnCTG_6_-_27759135_27759206@32.51.20,trn
ctctgaatccagcgatccga

SEQ ID NO: 2977 - DNA, 21 bp, homo sapiens
  tDNA131_GlnCTG_6_-_27759135_27759206@32.52.21,trn
ctctgaatccagcgatccgag

SEQ ID NO: 2978 - DNA, 22 bp, homo sapiens
  tDNA131_GlnCTG_6_-_27759135_27759206@32.53.22,trn
ctctgaatccagcgatccgagt

SEQ ID NO: 2979 - DNA, 24 bp, homo sapiens
  tDNA131_GlnCTG_6_-_27759135_27759206@32.55.24,trn
ctctgaatccagcgatccgagttc

SEQ ID NO: 2980 - DNA, 17 bp, homo sapiens
  tDNA111_HisGTG_1_-_147774845_147774916@25.41.17,t
ctctgcgttgtggccgc

SEQ ID NO: 2981 - DNA, 20 bp, homo sapiens
  tDNA111_HisGTG_1_-_147774845_147774916@25.44.20,t
ctctgcgttgtggccgcagc

SEQ ID NO: 2982 - DNA, 16 bp, homo sapiens
  tDNA22_GlnCTG_1_+_147800937_147801008@25.40.16,tr
ctctggactctgaatc

SEQ ID NO: 2983 - DNA, 17 bp, homo sapiens
  tDNA22_GlnCTG_1_+_147800937_147801008@25.41.17,tr
ctctggactctgaatcc

SEQ ID NO: 2984 - DNA, 18 bp, homo sapiens
  tDNA22_GlnCTG_1_+_147800937_147801008@25.42.18,tr
ctctggactctgaatcca

SEQ ID NO: 2985 - DNA, 19 bp, homo sapiens
  tDNA22_GlnCTG_1_+_147800937_147801008@25.43.19,tr
ctctggactctgaatccag

SEQ ID NO: 2986 - DNA, 20 bp, homo sapiens
  tDNA22_GlnCTG_1_+_147800937_147801008@25.44.20,tr
ctctggactctgaatccagc

SEQ ID NO: 2987 - DNA, 21 bp, homo sapiens
  tDNA131_GlnCTG_6_-_27759135_27759206@25.45.21,trn
ctctggactctgaatccagcg

SEQ ID NO: 2988 - DNA, 22 bp, homo sapiens
  tDNA131_GlnCTG_6_-_27759135_27759206@25.46.22,trn
ctctggactctgaatccagcga

SEQ ID NO: 2989 - DNA, 23 bp, homo sapiens
  tDNA131_GlnCTG_6_-_27759135_27759206@25.47.23,trn
ctctggactctgaatccagcgat

SEQ ID NO: 2990 - DNA, 24 bp, homo sapiens
  tDNA131_GlnCTG_6_-_27759135_27759206@25.48.24,trn
ctctggactctgaatccagcgatc

SEQ ID NO: 2991 - DNA, 28 bp, homo sapiens
  tDNA131_GlnCTG_6_-_27759135_27759206@25.52.28,trn
ctctggactctgaatccagcgatccgag

SEQ ID NO: 2992 - DNA, 29 bp, homo sapiens
  tDNA131_GlnCTG_6_-_27759135_27759206@25.53.29,trn
ctctggactctgaatccagcgatccgagt

SEQ ID NO: 2993 - DNA, 16 bp, homo sapiens
  tDNA130_GlnTTG_6_-_27763640_27763711@25.40.16,trn
ctctggactttgaatc

SEQ ID NO: 2994 - DNA, 17 bp, homo sapiens
  tDNA130_GlnTTG_6_-_27763640_27763711@25.41.17,trn
ctctggactttgaatcc

SEQ ID NO: 2995 - DNA, 20 bp, homo sapiens
  tDNA130_GlnTTG_6_-_27763640_27763711@25.44.20,trn
ctctggactttgaatccagc

SEQ ID NO: 2996 - DNA, 16 bp, homo sapiens
  tDNA22_GlnCTG_1_+_147800937_147801008@60.75.16
ctctgtggaacctcca

SEQ ID NO: 2997 - DNA, 17 bp, homo sapiens
  tDNA20_AsnATT_1_+_147719029_147719102@3.19.17,trn
ctctgtggcgcaatcgg

SEQ ID NO: 2998 - DNA, 18 bp, homo sapiens
  tDNA20_AsnATT_1_+_147719029_147719102@3.20.18,trn
ctctgtggcgcaatcggt

SEQ ID NO: 2999 - DNA, 17 bp, homo sapiens
  tDNA86_ArgTCT_1_-_159111401_159111474@3.19.17,trn
ctctgtggcgcaatgga

SEQ ID NO: 3000 - DNA, 16 bp, homo sapiens
  tDNAMT_LysTTT_MT_+_8295_8364@58.73.16,tDNAlookali
ctctttacagtgacca

SEQ ID NO: 3001 - DNA, 20 bp, homo sapiens
  tDNAMT_PheGAA_MT_+_577_647@33.52.20
ctgaaaatgtttagacgggc

SEQ ID NO: 3002 - DNA, 21 bp, homo sapiens
  tDNAMT_PheGAA_MT_+_577_647@33.53.21
ctgaaaatgtttagacgggct

SEQ ID NO: 3003 - DNA, 23 bp, homo sapiens
  tDNA72_PheGAA_6_+_28732164_28732236@32.54.23,tDNA
ctgaagatctaaaggtccctggt

SEQ ID NO: 3004 - DNA, 19 bp, homo sapiens
  tDNA131_GlnCTG_6_-_27759135_27759206@34.52.19,trn
ctgaatccagcgatccgag

SEQ ID NO: 3005 - DNA, 20 bp, homo sapiens
  tDNA131_GlnCTG_6_-_27759135_27759206@34.53.20,trn
ctgaatccagcgatccgagt

SEQ ID NO: 3006 - DNA, 21 bp, homo sapiens
  tDNA131_GlnCTG_6_-_27759135_27759206@34.54.21,trn
ctgaatccagcgatccgagtt

SEQ ID NO: 3007 - DNA, 22 bp, homo sapiens
  tDNA131_GlnCTG_6_-_27759135_27759206@34.55.22,trn
ctgaatccagcgatccgagttc

SEQ ID NO: 3008 - DNA, 24 bp, homo sapiens
  tDNA1_TrpCCA_7_+_99067307_99067378@27.50.24,tDNA6
ctgactccagatcagaaggttgcg

SEQ ID NO: 3009 - DNA, 21 bp, homo sapiens
  tDNAMT_TyrGTA_MT_-_5826_5891@11.31.21
ctgagtgaagcattggactgt

SEQ ID NO: 3010 - DNA, 22 bp, homo sapiens
  tDNAMT_TyrGTA_MT_-_5826_5891@11.32.22
ctgagtgaagcattggactgta

SEQ ID NO: 3011 - DNA, 23 bp, homo sapiens
  tDNAMT_TyrGTA_MT_-_5826_5891@11.33.23
ctgagtgaagcattggactgtaa

SEQ ID NO: 3012 - DNA, 22 bp, homo sapiens
  tDNAMT_AlaTGC_MT_-_5587_5655@25.46.22,tDNAlookali
ctgatttgcgttcagttgatgc

SEQ ID NO: 3013 - DNA, 20 bp, homo sapiens
  tDNA12_CysGCA_3_-_17741392_17741464@32.51.20,tDNA
ctgcagatcaagaggtcccc

SEQ ID NO: 3014 - DNA, 22 bp, homo sapiens
  tDNA12_CysGCA_3_-_17741392_17741464@32.53.22,tDNA
ctgcagatcaagaggtccccgg

SEQ ID NO: 3015 - DNA, 23 bp, homo sapiens
  tDNA12_CysGCA_3_-_17741392_17741464@32.54.23,tDNA
ctgcagatcaagaggtccccggt

SEQ ID NO: 3016 - DNA, 22 bp, homo sapiens
  tDNA23_CysGCA_7_-_149072850_149072921@31.52.22,tr
ctgcagatcaagaggtccctgg

SEQ ID NO: 3017 - DNA, 23 bp, homo sapiens
  tDNA23_CysGCA_7_-_149072850_149072921@31.53.23,tr
ctgcagatcaagaggtccctggt

SEQ ID NO: 3018 - DNA, 18 bp, homo sapiens
  tDNA25_GlyGCC_16_-_70812114_70812184@31.48.18,trn
ctgccacgcgggaggccc

SEQ ID NO: 3019 - DNA, 22 bp, homo sapiens
  tDNA25_GlyGCC_16_-_70812114_70812184@31.52.22,trn
ctgccacgcgggaggcccgggt

SEQ ID NO: 3020 - DNA, 20 bp, homo sapiens
  tDNA10_GlyTCC_17_+_8124866_8124937@28.47.20,tDNA1
ctgccttccaagcagttgac

SEQ ID NO: 3021 - DNA, 21 bp, homo sapiens
  tDNA10_GlyTCC_17_+_8124866_8124937@28.48.21,tDNA1
ctgccttccaagcagttgacc

SEQ ID NO: 3022 - DNA, 22 bp, homo sapiens
  tDNA10_GlyTCC_17_+_8124866_8124937@28.49.22,tDNA1
ctgccttccaagcagttgaccc

SEQ ID NO: 3023 - DNA, 23 bp, homo sapiens
  tDNA10_GlyTCC_17_+_8124866_8124937@28.50.23,tDNA1
ctgccttccaagcagttgacccg

SEQ ID NO: 3024 - DNA, 24 bp, homo sapiens
  tDNA10_GlyTCC_17_+_8124866_8124937@28.51.24,tDNA1
ctgccttccaagcagttgacccgg

SEQ ID NO: 3025 - DNA, 25 bp, homo sapiens
  tDNA10_GlyTCC_17_+_8124866_8124937@28.52.25,tDNA1
ctgccttccaagcagttgacccggg

SEQ ID NO: 3026 - DNA, 26 bp, homo sapiens
  tDNA10_GlyTCC_17_+_8124866_8124937@28.53.26,tDNA1
ctgccttccaagcagttgacccgggt

SEQ ID NO: 3027 - DNA, 27 bp, homo sapiens
  tDNA10_GlyTCC_17_+_8124866_8124937@28.54.27,tDNA1
ctgccttccaagcagttgacccgggtt

SEQ ID NO: 3028 - DNA, 18 bp, homo sapiens
  tDNAMT_SerGCT_MT_+_12207_12265@18.35.18
ctgctaactcatgccccc

SEQ ID NO: 3029 - DNA, 19 bp, homo sapiens
  tDNAMT_SerGCT_MT_+_12207_12265@18.36.19
ctgctaactcatgccccca

SEQ ID NO: 3030 - DNA, 20 bp, homo sapiens
  tDNAMT_SerGCT_MT_+_12207_12265@18.37.20
ctgctaactcatgcccccat

SEQ ID NO: 3031 - DNA, 21 bp, homo sapiens
  tDNAMT_SerGCT_MT_+_12207_12265@18.38.21
ctgctaactcatgcccccatg

SEQ ID NO: 3032 - DNA, 22 bp, homo sapiens
  tDNAMT_SerGCT_MT_+_12207_12265@18.39.22
ctgctaactcatgcccccatgt

SEQ ID NO: 3033 - DNA, 23 bp, homo sapiens
  tDNAMT_SerGCT_MT_+_12207_12265@18.40.23
ctgctaactcatgcccccatgtc

SEQ ID NO: 3034 - DNA, 16 bp, homo sapiens
  tDNA3_GlnCTG_12_+_74851182_74851254@27.42.16,tDNA
ctggactctgaatcca

SEQ ID NO: 3035 - DNA, 17 bp, homo sapiens
  tDNA3_GlnCTG_12_+_74851182_74851254@27.43.17,tDNA
ctggactctgaatccag

SEQ ID NO: 3036 - DNA, 18 bp, homo sapiens
  tDNA3_GlnCTG_12_+_74851182_74851254@27.44.18,tDNA
ctggactctgaatccagc

SEQ ID NO: 3037 - DNA, 19 bp, homo sapiens
  tDNA131_GlnCTG_6_-_27759135_27759206@27.45.19,trn
ctggactctgaatccagcg

SEQ ID NO: 3038 - DNA, 20 bp, homo sapiens
  tDNA131_GlnCTG_6_-_27759135_27759206@27.46.20,trn
ctggactctgaatccagcga

SEQ ID NO: 3039 - DNA, 21 bp, homo sapiens
  tDNA131_GlnCTG_6_-_27759135_27759206@27.47.21,trn
ctggactctgaatccagcgat

SEQ ID NO: 3040 - DNA, 22 bp, homo sapiens
  tDNA131_GlnCTG_6_-_27759135_27759206@27.48.22,trn
ctggactctgaatccagcgatc

SEQ ID NO: 3041 - DNA, 23 bp, homo sapiens
  tDNA131_GlnCTG_6_-_27759135_27759206@27.49.23,trn
ctggactctgaatccagcgatcc

SEQ ID NO: 3042 - DNA, 25 bp, homo sapiens
  tDNA131_GlnCTG_6_-_27759135_27759206@27.51.25,trn
ctggactctgaatccagcgatccga

SEQ ID NO: 3043 - DNA, 26 bp, homo sapiens
  tDNA131_GlnCTG_6_-_27759135_27759206@27.52.26,trn
ctggactctgaatccagcgatccgag

SEQ ID NO: 3044 - DNA, 27 bp, homo sapiens
  tDNA131_GlnCTG_6_-_27759135_27759206@27.53.27,trn
ctggactctgaatccagcgatccgagt

SEQ ID NO: 3045 - DNA, 30 bp, homo sapiens
  tDNA23_ArgCCG_17_-_66016013_66016085@40.69.30
ctggggattgtgggttcgagtcccatctgg

SEQ ID NO: 3046 - DNA, 22 bp, homo sapiens
  tDNA19_TyrGTA_14_-_21121258_21121351@16.37.22,trn
ctggtagagcggaggactgtag

SEQ ID NO: 3047 - DNA, 26 bp, homo sapiens
  tDNA59_GluCTC_1_+_249168447_249168518@4.29.26,trn
ctggtggtctagtggttaggattcgg

SEQ ID NO: 3048 - DNA, 24 bp, homo sapiens
  tDNA34_GlyCCC_16_-_686736_686806@7.30.24,tDNA27_G
ctggtgtagtggtatcatgcaaga

SEQ ID NO: 3049 - DNA, 23 bp, homo sapiens
  tDNA3_GluTTC_13_-_45492062_45492133@28.50.23,tDNA
ctggttttcacccaggcggcccg

SEQ ID NO: 3050 - DNA, 21 bp, homo sapiens
  tDNA5_GluTTC_13_-_41634874_41634945@28.48.21,tDNA
ctggttttcacccaggtggcc

SEQ ID NO: 3051 - DNA, 23 bp, homo sapiens
  tDNA5_GluTTC_13_-_41634874_41634945@28.50.23,tDNA
ctggttttcacccaggtggcccg

SEQ ID NO: 3052 - DNA, 24 bp, homo sapiens
  tDNA5_GluTTC_13_-_41634874_41634945@28.51.24,tDNA
ctggttttcacccaggtggcccgg

SEQ ID NO: 3053 - DNA, 25 bp, homo sapiens
  tDNA5_GluTTC_13_-_41634874_41634945@28.52.25,tDNA
ctggttttcacccaggtggcccggg

SEQ ID NO: 3054 - DNA, 18 bp, homo sapiens
  tDNAMT_LysTTT_MT_+_8295_8364@3.20.18,tDNAlookalik
ctgtaaagctaacttagc

SEQ ID NO: 3055 - DNA, 21 bp, homo sapiens
  tDNAMT_LysTTT_MT_+_8295_8364@3.23.21,tDNAlookalik
ctgtaaagctaacttagcatt

SEQ ID NO: 3056 - DNA, 22 bp, homo sapiens
  tDNAMT_LysTTT_MT_+_8295_8364@3.24.22,tDNAlookalik
ctgtaaagctaacttagcatta

SEQ ID NO: 3057 - DNA, 23 bp, homo sapiens
  tDNAMT_LysTTT_MT_+_8295_8364@3.25.23,tDNAlookalik
ctgtaaagctaacttagcattaa

SEQ ID NO: 3058 - DNA, 24 bp, homo sapiens
  tDNAMT_LysTTT_MT_+_8295_8364@3.26.24,tDNAlookalik
ctgtaaagctaacttagcattaac

SEQ ID NO: 3059 - DNA, 25 bp, homo sapiens
  tDNAMT_LysTTT_MT_+_8295_8364@3.27.25,tDNAlookalik
ctgtaaagctaacttagcattaacc

SEQ ID NO: 3060 - DNA, 19 bp, homo sapiens
  tDNA19_TyrGTA_14_-_21121258_21121351@32.50.19,trn
ctgtagatccttaggtcgc

SEQ ID NO: 3061 - DNA, 20 bp, homo sapiens
  tDNA19_TyrGTA_14_-_21121258_21121351@32.51.20,trn
ctgtagatccttaggtcgct

SEQ ID NO: 3062 - DNA, 21 bp, homo sapiens
  tDNA19_TyrGTA_14_-_21121258_21121351@32.52.21,trn
ctgtagatccttaggtcgctg

SEQ ID NO: 3063 - DNA, 22 bp, homo sapiens
  tDNA19_TyrGTA_14_-_21121258_21121351@32.53.22,trn
ctgtagatccttaggtcgctgg

SEQ ID NO: 3064 - DNA, 23 bp, homo sapiens
  tDNA19_TyrGTA_14_-_21121258_21121351@32.54.23,trn
ctgtagatccttaggtcgctggt

SEQ ID NO: 3065 - DNA, 24 bp, homo sapiens
  tDNA19_TyrGTA_14_-_21121258_21121351@32.55.24,trn
ctgtagatccttaggtcgctggtt

SEQ ID NO: 3066 - DNA, 16 bp, homo sapiens
  tDNA152_ValCAC_6_-_27248049_27248121@5.20.16
ctgtagtgtagtggtt

SEQ ID NO: 3067 - DNA, 19 bp, homo sapiens
  tDNA152_ValCAC_6_-_27248049_27248121@5.23.19
ctgtagtgtagtggttatc

SEQ ID NO: 3068 - DNA, 27 bp, homo sapiens
  tDNA152_ValCAC_6_-_27248049_27248121@5.31.27
ctgtagtgtagtggttatcacgttcgc

SEQ ID NO: 3069 - DNA, 28 bp, homo sapiens
  tDNA152_ValCAC_6_-_27248049_27248121@5.32.28
ctgtagtgtagtggttatcacgttcgcc

SEQ ID NO: 3070 - DNA, 16 bp, homo sapiens
  tDNA22_AspGTC_5_-_141773988_141774059@32.47.16,tr
ctgtcacgcgggagac

SEQ ID NO: 3071 - DNA, 17 bp, homo sapiens
  tDNA6_AspGTC_9_-_77517990_77518061@32.48.17,tDNA1
ctgtcacgcgggagacc

SEQ ID NO: 3072 - DNA, 19 bp, homo sapiens
  tDNA6_AspGTC_9_-_77517990_77518061@32.50.19,tDNA1
ctgtcacgcgggagaccgg

SEQ ID NO: 3073 - DNA, 22 bp, homo sapiens
  tDNA6_AspGTC_9_-_77517990_77518061@32.53.22,tDNA1
ctgtcacgcgggagaccggggt

SEQ ID NO: 3074 - DNA, 23 bp, homo sapiens
  tDNA6_AspGTC_9_-_77517990_77518061@32.54.23,tDNA1
ctgtcacgcgggagaccggggtt

SEQ ID NO: 3075 - DNA, 23 bp, homo sapiens
  tDNA103_AsnGTT_1_-_149230570_149230643@33.55.23,t
ctgttaaccgaaaggttggtggt

SEQ ID NO: 3076 - DNA, 21 bp, homo sapiens
  tDNAMT_LeuTAA_MT_+_3230_3304@34.54.21
cttaaaactttacagtcagag

SEQ ID NO: 3077 - DNA, 20 bp, homo sapiens
  tDNAMT_IleGAT_MT_+_4263_4331@50.69.20
cttaaacccccttatttcta

SEQ ID NO: 3078 - DNA, 22 bp, homo sapiens
  tDNAMT_IleGAT_MT_+_4263_4331@50.71.22
cttaaacccccttatttctacc

SEQ ID NO: 3079 - DNA, 23 bp, homo sapiens
  tDNAMT_IleGAT_MT_+_4263_4331@50.72.23
cttaaacccccttatttctacca

SEQ ID NO: 3080 - DNA, 16 bp, homo sapiens
  tDNAMT_ValTAC_MT_+_1602_1670@51.66.16
cttaacttgaccgctc

SEQ ID NO: 3081 - DNA, 18 bp, homo sapiens
  tDNAMT_ValTAC_MT_+_1602_1670@51.68.18
cttaacttgaccgctctg

SEQ ID NO: 3082 - DNA, 19 bp, homo sapiens
  tDNAMT_ValTAC_MT_+_1602_1670@51.69.19
cttaacttgaccgctctga

SEQ ID NO: 3083 - DNA, 20 bp, homo sapiens
  tDNAMT_ValTAC_MT_+_1602_1670@51.70.20
cttaacttgaccgctctgac

SEQ ID NO: 3084 - DNA, 21 bp, homo sapiens
  tDNAMT_ValTAC_MT_+_1602_1670@51.71.21
cttaacttgaccgctctgacc

SEQ ID NO: 3085 - DNA, 22 bp, homo sapiens
  tDNAMT_ValTAC_MT_+_1602_1670@51.72.22
cttaacttgaccgctctgacca

SEQ ID NO: 3086 - DNA, 21 bp, homo sapiens
  tDNAMT_ValTAC_MT_+_1602_1670@30.50.21
cttacacttaggagatttcaa

SEQ ID NO: 3087 - DNA, 30 bp, homo sapiens
  tDNAMT_ValTAC_MT_+_1602_1670@30.59.30
cttacacttaggagatttcaacttaacttg

SEQ ID NO: 3088 - DNA, 21 bp, homo sapiens
  tDNAMT_HisGTG_MT_+_12138_12206@50.70.21
cttacgaccccttatttaccc

SEQ ID NO: 3089 - DNA, 22 bp, homo sapiens
  tDNAMT_HisGTG_MT_+_12138_12206@50.71.22
cttacgaccccttatttacccc

SEQ ID NO: 3090 - DNA, 23 bp, homo sapiens
  tDNAMT_HisGTG_MT_+_12138_12206@50.72.23
cttacgaccccttatttacccca

SEQ ID NO: 3091 - DNA, 27 bp, homo sapiens
  tDNAMT_ValTAC_MT_+_1602_1670@36.62.27
cttaggagatttcaacttaacttgacc

SEQ ID NO: 3092 - DNA, 28 bp, homo sapiens
  tDNAMT_ValTAC_MT_+_1602_1670@36.63.28
cttaggagatttcaacttaacttgaccg

SEQ ID NO: 3093 - DNA, 30 bp, homo sapiens
  tDNAMT_ValTAC_MT_+_1602_1670@36.65.30
cttaggagatttcaacttaacttgaccgct

SEQ ID NO: 3094 - DNA, 23 bp, homo sapiens
  tDNA29_IleTAT_6_+_26988125_26988218@33.55.23,tDNA
cttataatgccgaggttgtgagt

SEQ ID NO: 3095 - DNA, 20 bp, homo sapiens
  tDNAMT_CysGCA_MT_-_5761_5826@47.66.20
cttcaaacctgccggggctt

SEQ ID NO: 3096 - DNA, 21 bp, homo sapiens
  tDNAMT_CysGCA_MT_-_5761_5826@47.67.21
cttcaaacctgccggggcttc

SEQ ID NO: 3097 - DNA, 22 bp, homo sapiens
  tDNAMT_CysGCA_MT_-_5761_5826@47.68.22
cttcaaacctgccggggcttcc

SEQ ID NO: 3098 - DNA, 23 bp, homo sapiens
  tDNAMT_CysGCA_MT_-_5761_5826@47.69.23
cttcaaacctgccggggcttcca

SEQ ID NO: 3099 - DNA, 19 bp, homo sapiens
  tDNA82_GlyTCC_1_-_161409961_161410032@32.50.19,tr
cttccaagcagttgacccg

SEQ ID NO: 3100 - DNA, 20 bp, homo sapiens
  tDNA82_GlyTCC_1_-_161409961_161410032@32.51.20,tr
cttccaagcagttgacccgg

SEQ ID NO: 3101 - DNA, 22 bp, homo sapiens
  tDNA10_GlyTCC_17_+_8124866_8124937@32.53.22,tDNA1
cttccaagcagttgacccgggt

SEQ ID NO: 3102 - DNA, 23 bp, homo sapiens
  tDNA10_GlyTCC_17_+_8124866_8124937@32.54.23,tDNA1
cttccaagcagttgacccgggtt

SEQ ID NO: 3103 - DNA, 23 bp, homo sapiens
  tDNA124_ArgTCG_6_-_28510891_28510963@32.54.23,trn
cttcggatcagaagattgagggt

SEQ ID NO: 3104 - DNA, 19 bp, homo sapiens
  tDNA152_ValCAC_6_-_27248049_27248121@2.20.19
cttctgtagtgtagtggtt

SEQ ID NO: 3105 - DNA, 16 bp, homo sapiens
  tDNAMT_ValTAC_MT_+_1602_1670@56.71.16
cttgaccgctctgacc

SEQ ID NO: 3106 - DNA, 17 bp, homo sapiens
  tDNAMT_ValTAC_MT_+_1602_1670@56.72.17
cttgaccgctctgacca

SEQ ID NO: 3107 - DNA, 18 bp, homo sapiens
  tDNA134_GluTTC_1_-_16861774_16861845@32.49.18,trn
ctttcaccgccgcggccc

SEQ ID NO: 3108 - DNA, 22 bp, homo sapiens
  tDNA134_GluTTC_1_-_16861774_16861845@32.53.22,trn
ctttcaccgccgcggcccgggt

SEQ ID NO: 3109 - DNA, 22 bp, homo sapiens
  tDNA84_GlnTTG_6_+_145503859_145503930@32.53.22,tr
ctttgaatccagcaatccgagt

SEQ ID NO: 3110 - DNA, 18 bp, homo sapiens
  tDNA130_GlnTTG_6_-_27763640_27763711@32.49.18,trn
ctttgaatccagcgatcc

SEQ ID NO: 3111 - DNA, 19 bp, homo sapiens
  tDNA130_GlnTTG_6_-_27763640_27763711@32.50.19,trn
ctttgaatccagcgatccg

SEQ ID NO: 3112 - DNA, 21 bp, homo sapiens
  tDNA130_GlnTTG_6_-_27763640_27763711@32.52.21,trn
ctttgaatccagcgatccgag

SEQ ID NO: 3113 - DNA, 22 bp, homo sapiens
  tDNA130_GlnTTG_6_-_27763640_27763711@32.53.22,trn
ctttgaatccagcgatccgagt

SEQ ID NO: 3114 - DNA, 23 bp, homo sapiens
  tDNAMT_IleGAT_MT_+_4263_4331@26.48.23
ctttgatagagtaaataatagga

SEQ ID NO: 3115 - DNA, 24 bp, homo sapiens
  tDNAMT_IleGAT_MT_+_4263_4331@26.49.24
ctttgatagagtaaataataggag

SEQ ID NO: 3116 - DNA, 25 bp, homo sapiens
  tDNAMT_IleGAT_MT_+_4263_4331@26.50.25
ctttgatagagtaaataataggagc

SEQ ID NO: 3117 - DNA, 16 bp, homo sapiens
  tDNA8_SerGCT_11_+_66115591_66115672@48.63.16
ctttgcacgcgtgggt

SEQ ID NO: 3118 - DNA, 16 bp, homo sapiens
  tDNAMT_ProTGG_MT_-_15956_16023@29.44.16
ctttgggtgctaatgg

SEQ ID NO: 3119 - DNA, 19 bp, homo sapiens
  tDNAMT_ProTGG_MT_-_15956_16023@29.47.19
ctttgggtgctaatggtgg

SEQ ID NO: 3120 - DNA, 24 bp, homo sapiens
  tDNAMT_ProTGG_MT_-_15956_16023@29.52.24
ctttgggtgctaatggtggagtta

SEQ ID NO: 3121 - DNA, 26 bp, homo sapiens
  tDNAMT_LysTTT_MT_+_8295_8364@27.52.26,tDNAlookali
cttttaagttaaagattaagagaacc

SEQ ID NO: 3122 - DNA, 20 bp, homo sapiens
  tDNA12_LysTTT_14_-_74055529_74055601@32.51.20,trn
cttttaatctgagggtccag

SEQ ID NO: 3123 - DNA, 18 bp, homo sapiens
  tDNAMT_ThrTGT_MT_+_15888_15953@52.69.18
ctttttccaaggacacca

SEQ ID NO: 3124 - DNA, 16 bp, homo sapiens
  tDNAMT_SerTGA_MT_-_7446_7514@1.16.16,tDNAlookalik
gaaaaagtcatggagg

SEQ ID NO: 3125 - DNA, 18 bp, homo sapiens
  tDNAMT_SerTGA_MT_-_7446_7514@1.18.18,tDNAlookalik
gaaaaagtcatggaggcc

SEQ ID NO: 3126 - DNA, 19 bp, homo sapiens
  tDNAMT_SerTGA_MT_-_7446_7514@1.19.19,tDNAlookalik
gaaaaagtcatggaggcca

SEQ ID NO: 3127 - DNA, 21 bp, homo sapiens
  tDNAMT_SerTGA_MT_-_7446_7514@1.21.21,tDNAlookalik
gaaaaagtcatggaggccatg

SEQ ID NO: 3128 - DNA, 22 bp, homo sapiens
  tDNAMT_SerTGA_MT_-_7446_7514@1.22.22,tDNAlookalik
gaaaaagtcatggaggccatgg

SEQ ID NO: 3129 - DNA, 23 bp, homo sapiens
  tDNAMT_SerTGA_MT_-_7446_7514@1.23.23,tDNAlookalik
gaaaaagtcatggaggccatggg

SEQ ID NO: 3130 - DNA, 24 bp, homo sapiens
  tDNAMT_SerTGA_MT_-_7446_7514@1.24.24,tDNAlookalik
gaaaaagtcatggaggccatgggg

SEQ ID NO: 3131 - DNA, 25 bp, homo sapiens
  tDNAMT_SerTGA_MT_-_7446_7514@1.25.25,tDNAlookalik
gaaaaagtcatggaggccatggggt

SEQ ID NO: 3132 - DNA, 26 bp, homo sapiens
  tDNAMT_SerTGA_MT_-_7446_7514@1.26.26,tDNAlookalik
gaaaaagtcatggaggccatggggtt

SEQ ID NO: 3133 - DNA, 27 bp, homo sapiens
  tDNAMT_SerTGA_MT_-_7446_7514@1.27.27,tDNAlookalik
gaaaaagtcatggaggccatggggttg

SEQ ID NO: 3134 - DNA, 28 bp, homo sapiens
  tDNAMT_SerTGA_MT_-_7446_7514@1.28.28,tDNAlookalik
gaaaaagtcatggaggccatggggttgg

SEQ ID NO: 3135 - DNA, 24 bp, homo sapiens
  tDNAMT_ThrTGT_MT_+_15888_15953@46.69.24
gaaaacctttttccaaggacacca

SEQ ID NO: 3136 - DNA, 18 bp, homo sapiens
  tDNAMT_PheGAA_MT_+_577_647@35.52.18
gaaaatgtttagacgggc

SEQ ID NO: 3137 - DNA, 19 bp, homo sapiens
  tDNAMT_PheGAA_MT_+_577_647@35.53.19
gaaaatgtttagacgggct

SEQ ID NO: 3138 - DNA, 20 bp, homo sapiens
  tDNAMT_PheGAA_MT_+_577_647@35.54.20
gaaaatgtttagacgggctc

SEQ ID NO: 3139 - DNA, 21 bp, homo sapiens
  tDNAMT_PheGAA_MT_+_577_647@35.55.21
gaaaatgtttagacgggctca

SEQ ID NO: 3140 - DNA, 22 bp, homo sapiens
  tDNAMT_PheGAA_MT_+_577_647@35.56.22
gaaaatgtttagacgggctcac

SEQ ID NO: 3141 - DNA, 23 bp, homo sapiens
  tDNAMT_PheGAA_MT_+_577_647@35.57.23
gaaaatgtttagacgggctcaca

SEQ ID NO: 3142 - DNA, 20 bp, homo sapiens
  tDNA1_MetCAT_9_+_19403996_19404070@59.78.20,tDNA3
gaaaccatcctctgctacca

SEQ ID NO: 3143 - DNA, 25 bp, homo sapiens
  tDNAMT_SerGCT_MT_+_12207_12265@3.27.25
gaaagctcacaagaactgctaactc

SEQ ID NO: 3144 - DNA, 20 bp, homo sapiens
  tDNAMT_LysTTT_MT_+_8295_8364@48.67.20,tDNAlookali
gaaccaacacctctttacag

SEQ ID NO: 3145 - DNA, 25 bp, homo sapiens
  tDNAMT_LysTTT_MT_+_8295_8364@48.72.25,tDNAlookali
gaaccaacacctctttacagtgacc

SEQ ID NO: 3146 - DNA, 26 bp, homo sapiens
  tDNAMT_LysTTT_MT_+_8295_8364@48.73.26,tDNAlookali
gaaccaacacctctttacagtgacca

SEQ ID NO: 3147 - DNA, 20 bp, homo sapiens
  tDNAMT_SerGCT_MT_+_12207_12265@15.34.20
gaactgctaactcatgcccc

SEQ ID NO: 3148 - DNA, 21 bp, homo sapiens
  tDNAMT_SerGCT_MT_+_12207_12265@15.35.21
gaactgctaactcatgccccc

SEQ ID NO: 3149 - DNA, 22 bp, homo sapiens
  tDNAMT_SerGCT_MT_+_12207_12265@15.36.22
gaactgctaactcatgccccca

SEQ ID NO: 3150 - DNA, 24 bp, homo sapiens
  tDNAMT_SerGCT_MT_+_12207_12265@15.38.24
gaactgctaactcatgcccccatg

SEQ ID NO: 3151 - DNA, 16 bp, homo sapiens
  tDNAMT_TyrGTA_MT_-_5826_5891@17.32.16
gaagcattggactgta

SEQ ID NO: 3152 - DNA, 17 bp, homo sapiens
  tDNAMT_TyrGTA_MT_-_5826_5891@17.33.17
gaagcattggactgtaa

SEQ ID NO: 3153 - DNA, 21 bp, homo sapiens
  tDNAMT_TyrGTA_MT_-_5826_5891@17.37.21
gaagcattggactgtaaatct

SEQ ID NO: 3154 - DNA, 20 bp, homo sapiens
  tDNA6_TrpCCA_12_+_98898030_98898101@56.75.20
gaatcacgtcggggtcacca

SEQ ID NO: 3155 - DNA, 19 bp, homo sapiens
  tDNA131_GlnCTG_6_-_27759135_27759206@36.54.19,trn
gaatccagcgatccgagtt

SEQ ID NO: 3156 - DNA, 20 bp, homo sapiens
  tDNA4_ArgTCT_17_+_8024243_8024330@57.76.20
gaatcccaccagagtcgcca

SEQ ID NO: 3157 - DNA, 20 bp, homo sapiens
  tDNA34_LeuCAG_1_+_161411323_161411405@67.86.20,tr
gaatcccactcctgacacca

SEQ ID NO: 3158 - DNA, 20 bp, homo sapiens
  tDNA17_LeuCAG_16_+_57333863_57333945@67.86.20,trn
gaatcccacttctgacacca

SEQ ID NO: 3159 - DNA, 20 bp, homo sapiens
  tDNA40_ThrAGT_17_-_8042770_8042843@58.77.20,tDNA3
gaatcccagcggtgcctcca

SEQ ID NO: 3160 - DNA, 20 bp, homo sapiens
  tDNA175_SerGCT_6_-_26305718_26305801@68.87.20,trn
gaatcccatcctcgtcgcca

SEQ ID NO: 3161 - DNA, 20 bp, homo sapiens
  tDNA14_TyrGTA_6_+_26569086_26569176@57.76.20,tDNA
gaatccggctcgaaggacca

SEQ ID NO: 3162 - DNA, 20 bp, homo sapiens
  tDNA16_TyrGTA_6_+_26577332_26577420@57.76.20,tDNA
gaatccggctcggaggacca

SEQ ID NO: 3163 - DNA, 20 bp, homo sapiens
  tDNA145_SerAGA_6_-_27521192_27521273@66.85.20,trn
gaatcctgccgactacgcca

SEQ ID NO: 3164 - DNA, 17 bp, homo sapiens
  tDNA25_GlyGCC_16_-_70812114_70812184@21.37.17,trn
gaattctcgcctgccac

SEQ ID NO: 3165 - DNA, 18 bp, homo sapiens
  tDNA25_GlyGCC_16_-_70812114_70812184@21.38.18,trn
gaattctcgcctgccacg

SEQ ID NO: 3166 - DNA, 24 bp, homo sapiens
  tDNAMT_GlyTCC_MT_+_9991_10058@48.71.24
gacaacattcaaaaaagagtacca

SEQ ID NO: 3167 - DNA, 19 bp, homo sapiens
  tDNA124_ArgTCG_6_-_28510891_28510963@1.19.19,tDNA
gaccacgtggcctaatgga

SEQ ID NO: 3168 - DNA, 17 bp, homo sapiens
  tDNA23_ArgCCG_17_-_66016013_66016085@1.17.17
gacccagtggcctaatg

SEQ ID NO: 3169 - DNA, 18 bp, homo sapiens
  tDNA23_ArgCCG_17_-_66016013_66016085@1.18.18
gacccagtggcctaatgg

SEQ ID NO: 3170 - DNA, 19 bp, homo sapiens
  tDNA23_ArgCCG_17_-_66016013_66016085@1.19.19
gacccagtggcctaatgga

SEQ ID NO: 3171 - DNA, 20 bp, homo sapiens
  tDNA23_ArgCCG_17_-_66016013_66016085@1.20.20
gacccagtggcctaatggat

SEQ ID NO: 3172 - DNA, 21 bp, homo sapiens
  tDNA23_ArgCCG_17_-_66016013_66016085@1.21.21
gacccagtggcctaatggata

SEQ ID NO: 3173 - DNA, 22 bp, homo sapiens
  tDNA23_ArgCCG_17_-_66016013_66016085@1.22.22
gacccagtggcctaatggataa

SEQ ID NO: 3174 - DNA, 23 bp, homo sapiens
  tDNA23_ArgCCG_17_-_66016013_66016085@1.23.23
gacccagtggcctaatggataag

SEQ ID NO: 3175 - DNA, 24 bp, homo sapiens
  tDNA23_ArgCCG_17_-_66016013_66016085@1.24.24
gacccagtggcctaatggataagg

SEQ ID NO: 3176 - DNA, 25 bp, homo sapiens
  tDNA23_ArgCCG_17_-_66016013_66016085@1.25.25
gacccagtggcctaatggataaggc

SEQ ID NO: 3177 - DNA, 28 bp, homo sapiens
  tDNA23_ArgCCG_17_-_66016013_66016085@1.28.28
gacccagtggcctaatggataaggcatc

SEQ ID NO: 3178 - DNA, 30 bp, homo sapiens
  tDNA23_ArgCCG_17_-_66016013_66016085@1.30.30
gacccagtggcctaatggataaggcatcag

SEQ ID NO: 3179 - DNA, 18 bp, homo sapiens
  tDNAMT_HisGTG_MT_+_12138_12206@55.72.18
gaccccttatttacccca

SEQ ID NO: 3180 - DNA, 18 bp, homo sapiens
  tDNA19_ArgTCG_17_+_73031208_73031280@1.18.18
gaccgcgtggcctaatgg

SEQ ID NO: 3181 - DNA, 19 bp, homo sapiens
  tDNA19_ArgTCG_17_+_73031208_73031280@1.19.19
gaccgcgtggcctaatgga

SEQ ID NO: 3182 - DNA, 20 bp, homo sapiens
  tDNA19_ArgTCG_17_+_73031208_73031280@1.20.20
gaccgcgtggcctaatggat

SEQ ID NO: 3183 - DNA, 18 bp, homo sapiens
  tDNA1_TrpCCA_7_+_99067307_99067378@1.18.18,tDNA6_
gacctcgtggcgcaacgg

SEQ ID NO: 3184 - DNA, 19 bp, homo sapiens
  tDNA6_TrpCCA_12_+_98898030_98898101@1.19.19,tDNA6
gacctcgtggcgcaacggt

SEQ ID NO: 3185 - DNA, 20 bp, homo sapiens
  tDNA6_TrpCCA_12_+_98898030_98898101@1.20.20,tDNA6
gacctcgtggcgcaacggta

SEQ ID NO: 3186 - DNA, 21 bp, homo sapiens
  tDNA6_TrpCCA_12_+_98898030_98898101@1.21.21,tDNA6
gacctcgtggcgcaacggtag

SEQ ID NO: 3187 - DNA, 22 bp, homo sapiens
  tDNA6_TrpCCA_12_+_98898030_98898101@1.22.22,tDNA6
gacctcgtggcgcaacggtagc

SEQ ID NO: 3188 - DNA, 23 bp, homo sapiens
  tDNA6_TrpCCA_12_+_98898030_98898101@1.23.23,tDNA6
gacctcgtggcgcaacggtagcg

SEQ ID NO: 3189 - DNA, 24 bp, homo sapiens
  tDNA6_TrpCCA_12_+_98898030_98898101@1.24.24,tDNA6
gacctcgtggcgcaacggtagcgc

SEQ ID NO: 3190 - DNA, 18 bp, homo sapiens
  tDNA12_TrpCCA_17_+_19411494_19411565@1.18.18
gacctcgtggcgcaatgg

SEQ ID NO: 3191 - DNA, 19 bp, homo sapiens
  tDNA12_TrpCCA_17_+_19411494_19411565@1.19.19
gacctcgtggcgcaatggt

SEQ ID NO: 3192 - DNA, 21 bp, homo sapiens
  tDNA12_TrpCCA_17_+_19411494_19411565@1.21.21
gacctcgtggcgcaatggtag

SEQ ID NO: 3193 - DNA, 22 bp, homo sapiens
  tDNA12_TrpCCA_17_+_19411494_19411565@1.22.22
gacctcgtggcgcaatggtagc

SEQ ID NO: 3194 - DNA, 23 bp, homo sapiens
  tDNA12_TrpCCA_17_+_19411494_19411565@1.23.23
gacctcgtggcgcaatggtagcg

SEQ ID NO: 3195 - DNA, 24 bp, homo sapiens
  tDNA12_TrpCCA_17_+_19411494_19411565@1.24.24
gacctcgtggcgcaatggtagcgc

SEQ ID NO: 3196 - DNA, 18 bp, homo sapiens
  tDNA62_SerGCT_6_+_28180815_28180896@1.18.18,tDNA1
gacgaggtggccgagtgg

SEQ ID NO: 3197 - DNA, 19 bp, homo sapiens
  tDNA62_SerGCT_6_+_28180815_28180896@1.19.19,tDNA1
gacgaggtggccgagtggt

SEQ ID NO: 3198 - DNA, 20 bp, homo sapiens
  tDNA62_SerGCT_6_+_28180815_28180896@1.20.20,tDNA1
gacgaggtggccgagtggtt

SEQ ID NO: 3199 - DNA, 21 bp, homo sapiens
  tDNA62_SerGCT_6_+_28180815_28180896@1.21.21,tDNA1
gacgaggtggccgagtggtta

SEQ ID NO: 3200 - DNA, 22 bp, homo sapiens
  tDNA62_SerGCT_6_+_28180815_28180896@1.22.22,tDNA1
gacgaggtggccgagtggttaa

SEQ ID NO: 3201 - DNA, 23 bp, homo sapiens
  tDNA62_SerGCT_6_+_28180815_28180896@1.23.23,tDNA1
gacgaggtggccgagtggttaag

SEQ ID NO: 3202 - DNA, 24 bp, homo sapiens
  tDNA62_SerGCT_6_+_28180815_28180896@1.24.24,tDNA1
gacgaggtggccgagtggttaagg

SEQ ID NO: 3203 - DNA, 25 bp, homo sapiens
  tDNA62_SerGCT_6_+_28180815_28180896@1.25.25,tDNA1
gacgaggtggccgagtggttaaggc

SEQ ID NO: 3204 - DNA, 30 bp, homo sapiens
  tDNA62_SerGCT_6_+_28180815_28180896@1.30.30,tDNA1
gacgaggtggccgagtggttaaggcgatgg

SEQ ID NO: 3205 - DNA, 29 bp, homo sapiens
  tDNAMT_PheGAA_MT_+_577_647@46.74.29
gacgggctcacatcaccccataaacacca

SEQ ID NO: 3206 - DNA, 22 bp, homo sapiens
  tDNA1_TrpCCA_7_+_99067307_99067378@29.50.22,tDNA6
gactccagatcagaaggttgcg

SEQ ID NO: 3207 - DNA, 23 bp, homo sapiens
  tDNA1_TrpCCA_7_+_99067307_99067378@29.51.23,tDNA6
gactccagatcagaaggttgcgt

SEQ ID NO: 3208 - DNA, 18 bp, homo sapiens
  tDNA131_GlnCTG_6_-_27759135_27759206@30.47.18,trn
gactctgaatccagcgat

SEQ ID NO: 3209 - DNA, 19 bp, homo sapiens
  tDNA131_GlnCTG_6_-_27759135_27759206@30.48.19,trn
gactctgaatccagcgatc

SEQ ID NO: 3210 - DNA, 20 bp, homo sapiens
  tDNA131_GlnCTG_6_-_27759135_27759206@30.49.20,trn
gactctgaatccagcgatcc

SEQ ID NO: 3211 - DNA, 21 bp, homo sapiens
  tDNA131_GlnCTG_6_-_27759135_27759206@30.50.21,trn
gactctgaatccagcgatccg

SEQ ID NO: 3212 - DNA, 22 bp, homo sapiens
  tDNA131_GlnCTG_6_-_27759135_27759206@30.51.22,trn
gactctgaatccagcgatccga

SEQ ID NO: 3213 - DNA, 21 bp, homo sapiens
  tDNA130_GlnTTG_6_-_27763640_27763711@30.50.21,trn
gactttgaatccagcgatccg

SEQ ID NO: 3214 - DNA, 23 bp, homo sapiens
  tDNA130_GlnTTG_6_-_27763640_27763711@30.52.23,trn
gactttgaatccagcgatccgag

SEQ ID NO: 3215 - DNA, 16 bp, homo sapiens
  tDNAMT_ProTGG_MT_-_15956_16023@55.70.16
gactttttctctgacc

SEQ ID NO: 3216 - DNA, 17 bp, homo sapiens
  tDNAMT_ProTGG_MT_-_15956_16023@55.71.17
gactttttctctgacca

SEQ ID NO: 3217 - DNA, 16 bp, homo sapiens
  tDNAMT_SerGCT_MT_+_12207_12265@1.16.16
gagaaagctcacaaga

SEQ ID NO: 3218 - DNA, 17 bp, homo sapiens
  tDNAMT_SerGCT_MT_+_12207_12265@1.17.17
gagaaagctcacaagaa

SEQ ID NO: 3219 - DNA, 18 bp, homo sapiens
  tDNAMT_SerGCT_MT_+_12207_12265@1.18.18
gagaaagctcacaagaac

SEQ ID NO: 3220 - DNA, 19 bp, homo sapiens
  tDNAMT_SerGCT_MT_+_12207_12265@1.19.19
gagaaagctcacaagaact

SEQ ID NO: 3221 - DNA, 20 bp, homo sapiens
  tDNAMT_SerGCT_MT_+_12207_12265@1.20.20
gagaaagctcacaagaactg

SEQ ID NO: 3222 - DNA, 21 bp, homo sapiens
  tDNAMT_SerGCT_MT_+_12207_12265@1.21.21
gagaaagctcacaagaactgc

SEQ ID NO: 3223 - DNA, 22 bp, homo sapiens
  tDNAMT_SerGCT_MT_+_12207_12265@1.22.22
gagaaagctcacaagaactgct

SEQ ID NO: 3224 - DNA, 23 bp, homo sapiens
  tDNAMT_SerGCT_MT_+_12207_12265@1.23.23
gagaaagctcacaagaactgcta

SEQ ID NO: 3225 - DNA, 24 bp, homo sapiens
  tDNAMT_SerGCT_MT_+_12207_12265@1.24.24
gagaaagctcacaagaactgctaa

SEQ ID NO: 3226 - DNA, 25 bp, homo sapiens
  tDNAMT_SerGCT_MT_+_12207_12265@1.25.25
gagaaagctcacaagaactgctaac

SEQ ID NO: 3227 - DNA, 26 bp, homo sapiens
  tDNAMT_SerGCT_MT_+_12207_12265@1.26.26
gagaaagctcacaagaactgctaact

SEQ ID NO: 3228 - DNA, 27 bp, homo sapiens
  tDNAMT_SerGCT_MT_+_12207_12265@1.27.27
gagaaagctcacaagaactgctaactc

SEQ ID NO: 3229 - DNA, 28 bp, homo sapiens
  tDNAMT_SerGCT_MT_+_12207_12265@1.28.28
gagaaagctcacaagaactgctaactca

SEQ ID NO: 3230 - DNA, 30 bp, homo sapiens
  tDNAMT_SerGCT_MT_+_12207_12265@1.30.30
gagaaagctcacaagaactgctaactcatg

SEQ ID NO: 3231 - DNA, 22 bp, homo sapiens
  tDNAMT_LysTTT_MT_+_8295_8364@46.67.22,tDNAlookali
gagaaccaacacctctttacag

SEQ ID NO: 3232 - DNA, 26 bp, homo sapiens
  tDNAMT_LysTTT_MT_+_8295_8364@46.71.26,tDNAlookali
gagaaccaacacctctttacagtgac

SEQ ID NO: 3233 - DNA, 27 bp, homo sapiens
  tDNAMT_LysTTT_MT_+_8295_8364@46.72.27,tDNAlookali
gagaaccaacacctctttacagtgacc

SEQ ID NO: 3234 - DNA, 28 bp, homo sapiens
  tDNAMT_LysTTT_MT_+_8295_8364@46.73.28,tDNAlookali
gagaaccaacacctctttacagtgacca

SEQ ID NO: 3235 - DNA, 29 bp, homo sapiens
  tDNAMT_ThrTGT_MT_+_15888_15953@41.69.29
gagatgaaaacctttttccaaggacacca

SEQ ID NO: 3236 - DNA, 22 bp, homo sapiens
  tDNAMT_ValTAC_MT_+_1602_1670@41.62.22
gagatttcaacttaacttgacc

SEQ ID NO: 3237 - DNA, 23 bp, homo sapiens
  tDNAMT_ValTAC_MT_+_1602_1670@41.63.23
gagatttcaacttaacttgaccg

SEQ ID NO: 3238 - DNA, 24 bp, homo sapiens
  tDNAMT_ValTAC_MT_+_1602_1670@41.64.24
gagatttcaacttaacttgaccgc

SEQ ID NO: 3239 - DNA, 25 bp, homo sapiens
  tDNAMT_ValTAC_MT_+_1602_1670@41.65.25
gagatttcaacttaacttgaccgct

SEQ ID NO: 3240 - DNA, 26 bp, homo sapiens
  tDNAMT_ValTAC_MT_+_1602_1670@41.66.26
gagatttcaacttaacttgaccgctc

SEQ ID NO: 3241 - DNA, 27 bp, homo sapiens
  tDNAMT_ValTAC_MT_+_1602_1670@41.67.27
gagatttcaacttaacttgaccgctct

SEQ ID NO: 3242 - DNA, 28 bp, homo sapiens
  tDNAMT_ValTAC_MT_+_1602_1670@41.68.28
gagatttcaacttaacttgaccgctctg

SEQ ID NO: 3243 - DNA, 29 bp, homo sapiens
  tDNAMT_ValTAC_MT_+_1602_1670@41.69.29
gagatttcaacttaacttgaccgctctga

SEQ ID NO: 3244 - DNA, 30 bp, homo sapiens
  tDNAMT_ValTAC_MT_+_1602_1670@41.70.30
gagatttcaacttaacttgaccgctctgac

SEQ ID NO: 3245 - DNA, 22 bp, homo sapiens
  tDNA15_GlnCTG_1_+_145963304_145963375@20.41.22,tr
gagcactctggactctgaatcc

SEQ ID NO: 3246 - DNA, 25 bp, homo sapiens
  tDNA15_GlnCTG_1_+_145963304_145963375@20.44.25,tr
gagcactctggactctgaatccagc

SEQ ID NO: 3247 - DNA, 25 bp, homo sapiens
  tDNAMT_IleGAT_MT_+_4263_4331@47.71.25
gagcttaaacccccttatttctacc

SEQ ID NO: 3248 - DNA, 26 bp, homo sapiens
  tDNAMT_IleGAT_MT_+_4263_4331@47.72.26
gagcttaaacccccttatttctacca

SEQ ID NO: 3249 - DNA, 27 bp, homo sapiens
  tDNAMT_HisGTG_MT_+_12138_12206@46.72.27
gaggcttacgaccccttatttacccca

SEQ ID NO: 3250 - DNA, 20 bp, homo sapiens
  tDNA112_GlnCTG_1_-_147737382_147737453@56.75.20,t
gagtctcggtggaacctcca

SEQ ID NO: 3251 - DNA, 18 bp, homo sapiens
  tDNAMT_TyrGTA_MT_-_5826_5891@13.30.18
gagtgaagcattggactg

SEQ ID NO: 3252 - DNA, 19 bp, homo sapiens
  tDNAMT_TyrGTA_MT_-_5826_5891@13.31.19
gagtgaagcattggactgt

SEQ ID NO: 3253 - DNA, 20 bp, homo sapiens
  tDNAMT_TyrGTA_MT_-_5826_5891@13.32.20
gagtgaagcattggactgta

SEQ ID NO: 3254 - DNA, 21 bp, homo sapiens
  tDNAMT_TyrGTA_MT_-_5826_5891@13.33.21
gagtgaagcattggactgtaa

SEQ ID NO: 3255 - DNA, 22 bp, homo sapiens
  tDNAMT_TyrGTA_MT_-_5826_5891@13.34.22
gagtgaagcattggactgtaaa

SEQ ID NO: 3256 - DNA, 23 bp, homo sapiens
  tDNAMT_TyrGTA_MT_-_5826_5891@13.35.23
gagtgaagcattggactgtaaat

SEQ ID NO: 3257 - DNA, 24 bp, homo sapiens
  tDNAMT_TyrGTA_MT_-_5826_5891@13.36.24
gagtgaagcattggactgtaaatc

SEQ ID NO: 3258 - DNA, 25 bp, homo sapiens
  tDNAMT_TyrGTA_MT_-_5826_5891@13.37.25
gagtgaagcattggactgtaaatct

SEQ ID NO: 3259 - DNA, 26 bp, homo sapiens
  tDNAMT_TyrGTA_MT_-_5826_5891@13.38.26
gagtgaagcattggactgtaaatcta

SEQ ID NO: 3260 - DNA, 20 bp, homo sapiens
  tDNA27_LeuTAG_16_-_22207032_22207113@13.32.20
gagtggtctaaggcgctgga

SEQ ID NO: 3261 - DNA, 22 bp, homo sapiens
  tDNAMT_ProTGG_MT_-_15956_16023@47.68.22
gagttaaagactttttctctga

SEQ ID NO: 3262 - DNA, 23 bp, homo sapiens
  tDNAMT_ProTGG_MT_-_15956_16023@47.69.23
gagttaaagactttttctctgac

SEQ ID NO: 3263 - DNA, 24 bp, homo sapiens
  tDNAMT_ProTGG_MT_-_15956_16023@47.70.24
gagttaaagactttttctctgacc

SEQ ID NO: 3264 - DNA, 25 bp, homo sapiens
  tDNAMT_ProTGG_MT_-_15956_16023@47.71.25
gagttaaagactttttctctgacca

SEQ ID NO: 3265 - DNA, 26 bp, homo sapiens
  tDNA112_GlnCTG_1_-_147737382_147737453@50.75.26,t
gagttcgagtctcggtggaacctcca

SEQ ID NO: 3266 - DNA, 21 bp, homo sapiens
  tDNAMT_LeuTAG_MT_+_12266_12336@11.31.21
gataacagctatccattggtc

SEQ ID NO: 3267 - DNA, 22 bp, homo sapiens
  tDNAMT_LeuTAG_MT_+_12266_12336@11.32.22
gataacagctatccattggtct

SEQ ID NO: 3268 - DNA, 18 bp, homo sapiens
  tDNAMT_ArgTCG_MT_+_10405_10469@48.65.18
gataatcatatttaccaa

SEQ ID NO: 3269 - DNA, 21 bp, homo sapiens
  tDNAMT_ArgTCG_MT_+_10405_10469@48.68.21
gataatcatatttaccaacca

SEQ ID NO: 3270 - DNA, 19 bp, homo sapiens
  tDNA5_LysTTT_11_+_59323902_59323974@6.24.19,tDNA1
gatagctcagtcggtagag

SEQ ID NO: 3271 - DNA, 20 bp, homo sapiens
  tDNA120_AlaAGC_6_-_28626014_28626085@56.75.20
gatccccagcatctccacca

SEQ ID NO: 3272 - DNA, 20 bp, homo sapiens
  tDNA119_AlaCGC_6_-_28641613_28641684@56.75.20,trn
gatccccggcatctccacca

SEQ ID NO: 3273 - DNA, 20 bp, homo sapiens
  tDNA15_PheGAA_11_-_59324970_59325042@57.76.20,trn
gatcccgggtttcggcacca

SEQ ID NO: 3274 - DNA, 23 bp, homo sapiens
  tDNA32_MetCAT_1_+_153643726_153643797@52.74.23,tr
gatcgaaaccatcctctgctacc

SEQ ID NO: 3275 - DNA, 24 bp, homo sapiens
  tDNA32_MetCAT_1_+_153643726_153643797@52.75.24,tr
gatcgaaaccatcctctgctacca

SEQ ID NO: 3276 - DNA, 24 bp, homo sapiens
  tDNA3_AlaAGC_2_+_27274082_27274154@53.76.24,tDNA6
gatcgatgcccgcatcctccacca

SEQ ID NO: 3277 - DNA, 17 bp, homo sapiens
  tDNA106_HisGTG_1_-_149155828_149155899@6.22.17,tr
gatcgtatagtggttag

SEQ ID NO: 3278 - DNA, 22 bp, homo sapiens
  tDNA106_HisGTG_1_-_149155828_149155899@6.27.22,tr
gatcgtatagtggttagtactc

SEQ ID NO: 3279 - DNA, 23 bp, homo sapiens
  tDNA106_HisGTG_1_-_149155828_149155899@6.28.23,tr
gatcgtatagtggttagtactct

SEQ ID NO: 3280 - DNA, 24 bp, homo sapiens
  tDNA106_HisGTG_1_-_149155828_149155899@6.29.24,tr
gatcgtatagtggttagtactctg

SEQ ID NO: 3281 - DNA, 25 bp, homo sapiens
  tDNA106_HisGTG_1_-_149155828_149155899@6.30.25,tr
gatcgtatagtggttagtactctgc

SEQ ID NO: 3282 - DNA, 29 bp, homo sapiens
  tDNA111_HisGTG_1_-_147774845_147774916@6.34.29,tr
gatcgtatagtggttagtactctgcgttg

SEQ ID NO: 3283 - DNA, 27 bp, homo sapiens
  tDNAMT_ThrTGT_MT_+_15888_15953@43.69.27
gatgaaaacctttttccaaggacacca

SEQ ID NO: 3284 - DNA, 30 bp, homo sapiens
  tDNAMT_AlaTGC_MT_-_5587_5655@42.71.30,tDNAlookali
gatgcagagtggggttttgcagtccttacc

SEQ ID NO: 3285 - DNA, 30 bp, homo sapiens
  tDNAMT_LysTTT_MT_+_8295_8364@40.69.30,tDNAlookali
gattaagagaaccaacacctctttacagtg

SEQ ID NO: 3286 - DNA, 24 bp, homo sapiens
  tDNAMT_AsnGTT_MT_-_5657_5729@17.40.24,tDNAlookali
gattagggtgcttagctgttaact

SEQ ID NO: 3287 - DNA, 20 bp, homo sapiens
  tDNA18_TyrGTA_14_-_21125623_21125716@57.76.20
gattccagctcgaaggacca

SEQ ID NO: 3288 - DNA, 19 bp, homo sapiens
  tDNA34_GlyCCC_16_-_686736_686806@29.47.19,tDNA27_
gattcccattcttgcgacc

SEQ ID NO: 3289 - DNA, 20 bp, homo sapiens
  tDNA34_GlyCCC_16_-_686736_686806@29.48.20,tDNA27_
gattcccattcttgcgaccc

SEQ ID NO: 3290 - DNA, 21 bp, homo sapiens
  tDNA34_GlyCCC_16_-_686736_686806@29.49.21,tDNA27_
gattcccattcttgcgacccg

SEQ ID NO: 3291 - DNA, 22 bp, homo sapiens
  tDNA34_GlyCCC_16_-_686736_686806@29.50.22,tDNA27_
gattcccattcttgcgacccgg

SEQ ID NO: 3292 - DNA, 24 bp, homo sapiens
  tDNA34_GlyCCC_16_-_686736_686806@29.52.24,tDNA27_
gattcccattcttgcgacccgggt

SEQ ID NO: 3293 - DNA, 22 bp, homo sapiens
  tDNA1_ArgCCG_16_+_3200675_3200747@30.51.22,tDNA11
gattccggatcagaagattgag

SEQ ID NO: 3294 - DNA, 20 bp, homo sapiens
  tDNA19_TyrGTA_14_-_21121258_21121351@57.76.20,trn
gattccggctcgaaggacca

SEQ ID NO: 3295 - DNA, 20 bp, homo sapiens
  tDNAMT_SerTGA_MT_-_7446_7514@53.72.20,tDNAlookali
gattccttccttttttgcca

SEQ ID NO: 3296 - DNA, 20 bp, homo sapiens
  tDNAMT_GlnTTG_MT_-_4329_4400@56.75.20,tDNAlookali
gattctcatagtcctagcca

SEQ ID NO: 3297 - DNA, 16 bp, homo sapiens
  tDNAMT_HisGTG_MT_+_12138_12206@27.42.16
gattgtgaatctgaca

SEQ ID NO: 3298 - DNA, 18 bp, homo sapiens
  tDNAMT_HisGTG_MT_+_12138_12206@27.44.18
gattgtgaatctgacaac

SEQ ID NO: 3299 - DNA, 19 bp, homo sapiens
  tDNAMT_HisGTG_MT_+_12138_12206@27.45.19
gattgtgaatctgacaaca

SEQ ID NO: 3300 - DNA, 20 bp, homo sapiens
  tDNAMT_HisGTG_MT_+_12138_12206@27.46.20
gattgtgaatctgacaacag

SEQ ID NO: 3301 - DNA, 21 bp, homo sapiens
  tDNAMT_HisGTG_MT_+_12138_12206@27.47.21
gattgtgaatctgacaacaga

SEQ ID NO: 3302 - DNA, 22 bp, homo sapiens
  tDNAMT_HisGTG_MT_+_12138_12206@27.48.22
gattgtgaatctgacaacagag

SEQ ID NO: 3303 - DNA, 23 bp, homo sapiens
  tDNAMT_HisGTG_MT_+_12138_12206@27.49.23
gattgtgaatctgacaacagagg

SEQ ID NO: 3304 - DNA, 24 bp, homo sapiens
  tDNAMT_HisGTG_MT_+_12138_12206@27.50.24
gattgtgaatctgacaacagaggc

SEQ ID NO: 3305 - DNA, 25 bp, homo sapiens
  tDNAMT_HisGTG_MT_+_12138_12206@27.51.25
gattgtgaatctgacaacagaggct

SEQ ID NO: 3306 - DNA, 26 bp, homo sapiens
  tDNAMT_HisGTG_MT_+_12138_12206@27.52.26
gattgtgaatctgacaacagaggctt

SEQ ID NO: 3307 - DNA, 27 bp, homo sapiens
  tDNAMT_HisGTG_MT_+_12138_12206@27.53.27
gattgtgaatctgacaacagaggctta

SEQ ID NO: 3308 - DNA, 28 bp, homo sapiens
  tDNAMT_HisGTG_MT_+_12138_12206@27.54.28
gattgtgaatctgacaacagaggcttac

SEQ ID NO: 3309 - DNA, 29 bp, homo sapiens
  tDNAMT_HisGTG_MT_+_12138_12206@27.55.29
gattgtgaatctgacaacagaggcttacg

SEQ ID NO: 3310 - DNA, 20 bp, homo sapiens
  tDNAMT_ValTAC_MT_+_1602_1670@43.62.20
gatttcaacttaacttgacc

SEQ ID NO: 3311 - DNA, 21 bp, homo sapiens
  tDNAMT_ValTAC_MT_+_1602_1670@43.63.21
gatttcaacttaacttgaccg

SEQ ID NO: 3312 - DNA, 22 bp, homo sapiens
  tDNAMT_ValTAC_MT_+_1602_1670@43.64.22
gatttcaacttaacttgaccgc

SEQ ID NO: 3313 - DNA, 23 bp, homo sapiens
  tDNAMT_ValTAC_MT_+_1602_1670@43.65.23
gatttcaacttaacttgaccgct

SEQ ID NO: 3314 - DNA, 24 bp, homo sapiens
  tDNAMT_ValTAC_MT_+_1602_1670@43.66.24
gatttcaacttaacttgaccgctc

SEQ ID NO: 3315 - DNA, 25 bp, homo sapiens
  tDNAMT_ValTAC_MT_+_1602_1670@43.67.25
gatttcaacttaacttgaccgctct

SEQ ID NO: 3316 - DNA, 26 bp, homo sapiens
  tDNAMT_ValTAC_MT_+_1602_1670@43.68.26
gatttcaacttaacttgaccgctctg

SEQ ID NO: 3317 - DNA, 27 bp, homo sapiens
  tDNAMT_ValTAC_MT_+_1602_1670@43.69.27
gatttcaacttaacttgaccgctctga

SEQ ID NO: 3318 - DNA, 28 bp, homo sapiens
  tDNAMT_ValTAC_MT_+_1602_1670@43.70.28
gatttcaacttaacttgaccgctctgac

SEQ ID NO: 3319 - DNA, 29 bp, homo sapiens
  tDNAMT_ValTAC_MT_+_1602_1670@43.71.29
gatttcaacttaacttgaccgctctgacc

SEQ ID NO: 3320 - DNA, 22 bp, homo sapiens
  tDNAMT_LeuTAG_MT_+_12266_12336@53.74.22
gcaactccaaataaaagtacca

SEQ ID NO: 3321 - DNA, 20 bp, homo sapiens
  tDNAMT_TrpTCA_MT_+_5512_5579@52.71.20,tDNAlookali
gcaatacttaatttctgcca

SEQ ID NO: 3322 - DNA, 30 bp, homo sapiens
  tDNA17_GluTTC_2_-_204229131_204229201@1.30.30
gcaatggtggttcagtggtagaattctcgc

SEQ ID NO: 3323 - DNA, 16 bp, homo sapiens
  tDNA22_GlnCTG_1_+_147800937_147801008@22.37.16,tr
gcactctggactctga

SEQ ID NO: 3324 - DNA, 17 bp, homo sapiens
  tDNA22_GlnCTG_1_+_147800937_147801008@22.38.17,tr
gcactctggactctgaa

SEQ ID NO: 3325 - DNA, 18 bp, homo sapiens
  tDNA22_GlnCTG_1_+_147800937_147801008@22.39.18,tr
gcactctggactctgaat

SEQ ID NO: 3326 - DNA, 19 bp, homo sapiens
  tDNA22_GlnCTG_1_+_147800937_147801008@22.40.19,tr
gcactctggactctgaatc

SEQ ID NO: 3327 - DNA, 20 bp, homo sapiens
  tDNA22_GlnCTG_1_+_147800937_147801008@22.41.20,tr
gcactctggactctgaatcc

SEQ ID NO: 3328 - DNA, 21 bp, homo sapiens
  tDNA22_GlnCTG_1_+_147800937_147801008@22.42.21,tr
gcactctggactctgaatcca

SEQ ID NO: 3329 - DNA, 22 bp, homo sapiens
  tDNA22_GlnCTG_1_+_147800937_147801008@22.43.22,tr
gcactctggactctgaatccag

SEQ ID NO: 3330 - DNA, 23 bp, homo sapiens
  tDNA22_GlnCTG_1_+_147800937_147801008@22.44.23,tr
gcactctggactctgaatccagc

SEQ ID NO: 3331 - DNA, 24 bp, homo sapiens
  tDNA131_GlnCTG_6_-_27759135_27759206@22.45.24,trn
gcactctggactctgaatccagcg

SEQ ID NO: 3332 - DNA, 27 bp, homo sapiens
  tDNA131_GlnCTG_6_-_27759135_27759206@22.48.27,trn
gcactctggactctgaatccagcgatc

SEQ ID NO: 3333 - DNA, 29 bp, homo sapiens
  tDNA131_GlnCTG_6_-_27759135_27759206@22.50.29,trn
gcactctggactctgaatccagcgatccg

SEQ ID NO: 3334 - DNA, 19 bp, homo sapiens
  tDNA130_GlnTTG_6_-_27763640_27763711@22.40.19,trn
gcactctggactttgaatc

SEQ ID NO: 3335 - DNA, 20 bp, homo sapiens
  tDNA130_GlnTTG_6_-_27763640_27763711@22.41.20,trn
gcactctggactttgaatcc

SEQ ID NO: 3336 - DNA, 30 bp, homo sapiens
  tDNA91_GlyCCC_1_-_149680210_149680280@1.30.30,trn
gcactggtggttcagtggtagaattctcgc

SEQ ID NO: 3337 - DNA, 30 bp, homo sapiens
  tDNA16_ValTAC_11_-_59318460_59318532@39.68.30,trn
gcagaaggtcctgggttcgagccccagtgg

SEQ ID NO: 3338 - DNA, 21 bp, homo sapiens
  tDNAMT_LeuTAA_MT_+_3230_3304@10.30.21
gcagagcccggtaatcgcata

SEQ ID NO: 3339 - DNA, 22 bp, homo sapiens
  tDNAMT_LeuTAA_MT_+_3230_3304@10.31.22
gcagagcccggtaatcgcataa

SEQ ID NO: 3340 - DNA, 30 bp, homo sapiens
  tDNA61_MetCAT_6_+_27745664_27745735@2.31.30,tDNA3
gcagagtggcgcagcggaagcgtgctgggc

SEQ ID NO: 3341 - DNA, 28 bp, homo sapiens
  tDNAMT_AlaTGC_MT_-_5587_5655@45.72.28,tDNAlookali
gcagagtggggttttgcagtccttacca

SEQ ID NO: 3342 - DNA, 18 bp, homo sapiens
  tDNA12_CysGCA_3_-_17741392_17741464@34.51.18,tDNA
gcagatcaagaggtcccc

SEQ ID NO: 3343 - DNA, 21 bp, homo sapiens
  tDNA12_CysGCA_3_-_17741392_17741464@34.54.21,tDNA
gcagatcaagaggtccccggt

SEQ ID NO: 3344 - DNA, 25 bp, homo sapiens
  tDNA2_SerTGA_10_+_69524261_69524342@1.25.25
gcagcgatggccgagtggttaaggc

SEQ ID NO: 3345 - DNA, 20 bp, homo sapiens
  tDNA68_AlaAGC_6_+_28687481_28687552@34.53.20,tDNA
gcatgcacgaggccccgggt

SEQ ID NO: 3346 - DNA, 16 bp, homo sapiens
  tDNA35_GlyGCC_1_+_161413094_161413164@1.16.16,trn
gcatgggtggttcagt

SEQ ID NO: 3347 - DNA, 17 bp, homo sapiens
  tDNA35_GlyGCC_1_+_161413094_161413164@1.17.17,trn
gcatgggtggttcagtg

SEQ ID NO: 3348 - DNA, 18 bp, homo sapiens
  tDNA35_GlyGCC_1_+_161413094_161413164@1.18.18,trn
gcatgggtggttcagtgg

SEQ ID NO: 3349 - DNA, 19 bp, homo sapiens
  tDNA35_GlyGCC_1_+_161413094_161413164@1.19.19,trn
gcatgggtggttcagtggt

SEQ ID NO: 3350 - DNA, 20 bp, homo sapiens
  tDNA35_GlyGCC_1_+_161413094_161413164@1.20.20,trn
gcatgggtggttcagtggta

SEQ ID NO: 3351 - DNA, 21 bp, homo sapiens
  tDNA35_GlyGCC_1_+_161413094_161413164@1.21.21,trn
gcatgggtggttcagtggtag

SEQ ID NO: 3352 - DNA, 22 bp, homo sapiens
  tDNA35_GlyGCC_1_+_161413094_161413164@1.22.22,trn
gcatgggtggttcagtggtaga

SEQ ID NO: 3353 - DNA, 23 bp, homo sapiens
  tDNA35_GlyGCC_1_+_161413094_161413164@1.23.23,trn
gcatgggtggttcagtggtagaa

SEQ ID NO: 3354 - DNA, 24 bp, homo sapiens
  tDNA35_GlyGCC_1_+_161413094_161413164@1.24.24,trn
gcatgggtggttcagtggtagaat

SEQ ID NO: 3355 - DNA, 25 bp, homo sapiens
  tDNA35_GlyGCC_1_+_161413094_161413164@1.25.25,trn
gcatgggtggttcagtggtagaatt

SEQ ID NO: 3356 - DNA, 26 bp, homo sapiens
  tDNA35_GlyGCC_1_+_161413094_161413164@1.26.26,trn
gcatgggtggttcagtggtagaattc

SEQ ID NO: 3357 - DNA, 27 bp, homo sapiens
  tDNA35_GlyGCC_1_+_161413094_161413164@1.27.27,trn
gcatgggtggttcagtggtagaattct

SEQ ID NO: 3358 - DNA, 28 bp, homo sapiens
  tDNA35_GlyGCC_1_+_161413094_161413164@1.28.28,trn
gcatgggtggttcagtggtagaattctc

SEQ ID NO: 3359 - DNA, 29 bp, homo sapiens
  tDNA35_GlyGCC_1_+_161413094_161413164@1.29.29,trn
gcatgggtggttcagtggtagaattctcg

SEQ ID NO: 3360 - DNA, 30 bp, homo sapiens
  tDNA35_GlyGCC_1_+_161413094_161413164@1.30.30,trn
gcatgggtggttcagtggtagaattctcgc

SEQ ID NO: 3361 - DNA, 17 bp, homo sapiens
  tDNAMT_TyrGTA_MT_-_5826_5891@20.36.17
gcattggactgtaaatc

SEQ ID NO: 3362 - DNA, 18 bp, homo sapiens
  tDNAMT_TyrGTA_MT_-_5826_5891@20.37.18
gcattggactgtaaatct

SEQ ID NO: 3363 - DNA, 19 bp, homo sapiens
  tDNAMT_TyrGTA_MT_-_5826_5891@20.38.19
gcattggactgtaaatcta

SEQ ID NO: 3364 - DNA, 24 bp, homo sapiens
  tDNAMT_TyrGTA_MT_-_5826_5891@20.43.24
gcattggactgtaaatctaaagac

SEQ ID NO: 3365 - DNA, 25 bp, homo sapiens
  tDNAMT_TyrGTA_MT_-_5826_5891@20.44.25
gcattggactgtaaatctaaagaca

SEQ ID NO: 3366 - DNA, 16 bp, homo sapiens
  tDNA133_GlyCCC_1_-_16872434_16872504@1.16.16,tDNA
gcattggtggttcagt

SEQ ID NO: 3367 - DNA, 17 bp, homo sapiens
  tDNA133_GlyCCC_1_-_16872434_16872504@1.17.17,tDNA
gcattggtggttcagtg

SEQ ID NO: 3368 - DNA, 18 bp, homo sapiens
  tDNA133_GlyCCC_1_-_16872434_16872504@1.18.18,tDNA
gcattggtggttcagtgg

SEQ ID NO: 3369 - DNA, 19 bp, homo sapiens
  tDNA133_GlyCCC_1_-_16872434_16872504@1.19.19,tDNA
gcattggtggttcagtggt

SEQ ID NO: 3370 - DNA, 20 bp, homo sapiens
  tDNA133_GlyCCC_1_-_16872434_16872504@1.20.20,tDNA
gcattggtggttcagtggta

SEQ ID NO: 3371 - DNA, 21 bp, homo sapiens
  tDNA133_GlyCCC_1_-_16872434_16872504@1.21.21,tDNA
gcattggtggttcagtggtag

SEQ ID NO: 3372 - DNA, 22 bp, homo sapiens
  tDNA133_GlyCCC_1_-_16872434_16872504@1.22.22,tDNA
gcattggtggttcagtggtaga

SEQ ID NO: 3373 - DNA, 23 bp, homo sapiens
  tDNA133_GlyCCC_1_-_16872434_16872504@1.23.23,tDNA
gcattggtggttcagtggtagaa

SEQ ID NO: 3374 - DNA, 24 bp, homo sapiens
  tDNA133_GlyCCC_1_-_16872434_16872504@1.24.24,tDNA
gcattggtggttcagtggtagaat

SEQ ID NO: 3375 - DNA, 25 bp, homo sapiens
  tDNA133_GlyCCC_1_-_16872434_16872504@1.25.25,tDNA
gcattggtggttcagtggtagaatt

SEQ ID NO: 3376 - DNA, 26 bp, homo sapiens
  tDNA133_GlyCCC_1_-_16872434_16872504@1.26.26,tDNA
gcattggtggttcagtggtagaattc

SEQ ID NO: 3377 - DNA, 27 bp, homo sapiens
  tDNA133_GlyCCC_1_-_16872434_16872504@1.27.27,tDNA
gcattggtggttcagtggtagaattct

SEQ ID NO: 3378 - DNA, 28 bp, homo sapiens
  tDNA133_GlyCCC_1_-_16872434_16872504@1.28.28,tDNA
gcattggtggttcagtggtagaattctc

SEQ ID NO: 3379 - DNA, 29 bp, homo sapiens
  tDNA133_GlyCCC_1_-_16872434_16872504@1.29.29,tDNA
gcattggtggttcagtggtagaattctcg

SEQ ID NO: 3380 - DNA, 30 bp, homo sapiens
  tDNA133_GlyCCC_1_-_16872434_16872504@1.30.30,tDNA
gcattggtggttcagtggtagaattctcgc

SEQ ID NO: 3381 - DNA, 20 bp, homo sapiens
  tDNA25_GlyGCC_16_-_70812114_70812184@33.52.20,trn
gccacgcgggaggcccgggt

SEQ ID NO: 3382 - DNA, 25 bp, homo sapiens
  tDNA3_ArgCCT_7_+_139025446_139025518@39.63.25,trn
gccagggattgtgggttcgagtccc

SEQ ID NO: 3383 - DNA, 18 bp, homo sapiens
  tDNA136_AsnGTT_1_-_16847080_16847153@60.77.18,trn
gcccacccagggacgcca

SEQ ID NO: 3384 - DNA, 18 bp, homo sapiens
  tDNA6_ValTAC_10_-_5895674_5895746@59.76.18,tDNA16
gccccagtggaaccacca

SEQ ID NO: 3385 - DNA, 18 bp, homo sapiens
  tDNA3_ArgCCT_7_+_139025446_139025518@1.18.18,tDNA
gccccagtggcctaatgg

SEQ ID NO: 3386 - DNA, 19 bp, homo sapiens
  tDNA3_ArgCCT_7_+_139025446_139025518@1.19.19,tDNA
gccccagtggcctaatgga

SEQ ID NO: 3387 - DNA, 20 bp, homo sapiens
  tDNA3_ArgCCT_7_+_139025446_139025518@1.20.20,tDNA
gccccagtggcctaatggat

SEQ ID NO: 3388 - DNA, 24 bp, homo sapiens
  tDNA3_ArgCCT_7_+_139025446_139025518@1.24.24,tDNA
gccccagtggcctaatggataagg

SEQ ID NO: 3389 - DNA, 25 bp, homo sapiens
  tDNA3_ArgCCT_7_+_139025446_139025518@1.25.25,tDNA
gccccagtggcctaatggataaggc

SEQ ID NO: 3390 - DNA, 19 bp, homo sapiens
  tDNAMT_SerGCT_MT_+_12207_12265@30.48.19
gcccccatgtctaacaaca

SEQ ID NO: 3391 - DNA, 23 bp, homo sapiens
  tDNAMT_SerGCT_MT_+_12207_12265@30.52.23
gcccccatgtctaacaacatggc

SEQ ID NO: 3392 - DNA, 24 bp, homo sapiens
  tDNAMT_SerGCT_MT_+_12207_12265@30.53.24
gcccccatgtctaacaacatggct

SEQ ID NO: 3393 - DNA, 29 bp, homo sapiens
  tDNAMT_SerGCT_MT_+_12207_12265@30.58.29
gcccccatgtctaacaacatggctttctc

SEQ ID NO: 3394 - DNA, 19 bp, homo sapiens
  tDNA2_ArgCCT_16_+_3202901_3202973@1.19.19
gccccggtggcctaatgga

SEQ ID NO: 3395 - DNA, 16 bp, homo sapiens
  tDNA3_AlaAGC_2_+_27274082_27274154@60.75.16,tDNA6
gcccgcatcctccacc

SEQ ID NO: 3396 - DNA, 17 bp, homo sapiens
  tDNA3_AlaAGC_2_+_27274082_27274154@60.76.17,tDNA6
gcccgcatcctccacca

SEQ ID NO: 3397 - DNA, 17 bp, homo sapiens
  tDNA9_AlaAGC_14_+_89445442_89445514@60.76.17,tDNA
gcccgcattctccacca

SEQ ID NO: 3398 - DNA, 17 bp, homo sapiens
  tDNA5_LysTTT_11_+_59323902_59323974@1.17.17,tDNA5
gcccggatagctcagtc

SEQ ID NO: 3399 - DNA, 18 bp, homo sapiens
  tDNA5_LysTTT_11_+_59323902_59323974@1.18.18,tDNA5
gcccggatagctcagtcg

SEQ ID NO: 3400 - DNA, 19 bp, homo sapiens
  tDNA5_LysTTT_11_+_59323902_59323974@1.19.19,tDNA5
gcccggatagctcagtcgg

SEQ ID NO: 3401 - DNA, 20 bp, homo sapiens
  tDNA5_LysTTT_11_+_59323902_59323974@1.20.20,tDNA5
gcccggatagctcagtcggt

SEQ ID NO: 3402 - DNA, 21 bp, homo sapiens
  tDNA5_LysTTT_11_+_59323902_59323974@1.21.21,tDNA5
gcccggatagctcagtcggta

SEQ ID NO: 3403 - DNA, 22 bp, homo sapiens
  tDNA5_LysTTT_11_+_59323902_59323974@1.22.22,tDNA5
gcccggatagctcagtcggtag

SEQ ID NO: 3404 - DNA, 23 bp, homo sapiens
  tDNA5_LysTTT_11_+_59323902_59323974@1.23.23,tDNA5
gcccggatagctcagtcggtaga

SEQ ID NO: 3405 - DNA, 24 bp, homo sapiens
  tDNA5_LysTTT_11_+_59323902_59323974@1.24.24,tDNA5
gcccggatagctcagtcggtagag

SEQ ID NO: 3406 - DNA, 25 bp, homo sapiens
  tDNA5_LysTTT_11_+_59323902_59323974@1.25.25,tDNA5
gcccggatagctcagtcggtagagc

SEQ ID NO: 3407 - DNA, 26 bp, homo sapiens
  tDNA5_LysTTT_11_+_59323902_59323974@1.26.26,tDNA5
gcccggatagctcagtcggtagagca

SEQ ID NO: 3408 - DNA, 28 bp, homo sapiens
  tDNA5_LysTTT_11_+_59323902_59323974@1.28.28,tDNA5
gcccggatagctcagtcggtagagcatc

SEQ ID NO: 3409 - DNA, 30 bp, homo sapiens
  tDNA5_LysTTT_11_+_59323902_59323974@1.30.30,tDNA5
gcccggatagctcagtcggtagagcatcag

SEQ ID NO: 3410 - DNA, 19 bp, homo sapiens
  tDNA10_LysCTT_16_+_3241501_3241573@1.19.19,tDNA32
gcccggctagctcagtcgg

SEQ ID NO: 3411 - DNA, 20 bp, homo sapiens
  tDNA10_LysCTT_16_+_3241501_3241573@1.20.20,tDNA32
gcccggctagctcagtcggt

SEQ ID NO: 3412 - DNA, 23 bp, homo sapiens
  tDNA10_LysCTT_16_+_3241501_3241573@1.23.23,tDNA32
gcccggctagctcagtcggtaga

SEQ ID NO: 3413 - DNA, 24 bp, homo sapiens
  tDNA10_LysCTT_16_+_3241501_3241573@1.24.24,tDNA32
gcccggctagctcagtcggtagag

SEQ ID NO: 3414 - DNA, 25 bp, homo sapiens
  tDNA10_LysCTT_16_+_3241501_3241573@1.25.25,tDNA32
gcccggctagctcagtcggtagagc

SEQ ID NO: 3415 - DNA, 26 bp, homo sapiens
  tDNA10_LysCTT_16_+_3241501_3241573@1.26.26,tDNA32
gcccggctagctcagtcggtagagca

SEQ ID NO: 3416 - DNA, 28 bp, homo sapiens
  tDNA10_LysCTT_16_+_3241501_3241573@1.28.28,tDNA32
gcccggctagctcagtcggtagagcatg

SEQ ID NO: 3417 - DNA, 29 bp, homo sapiens
  tDNA32_LysCTT_16_-_3207406_3207478@1.29.29,tDNA11
gcccggctagctcagtcggtagagcatga

SEQ ID NO: 3418 - DNA, 30 bp, homo sapiens
  tDNA32_LysCTT_16_-_3207406_3207478@1.30.30,tDNA11
gcccggctagctcagtcggtagagcatgag

SEQ ID NO: 3419 - DNA, 29 bp, homo sapiens
  tDNA10_LysCTT_16_+_3241501_3241573@1.29.29,tDNA13
gcccggctagctcagtcggtagagcatgg

SEQ ID NO: 3420 - DNA, 30 bp, homo sapiens
  tDNA10_LysCTT_16_+_3241501_3241573@1.30.30,tDNA13
gcccggctagctcagtcggtagagcatggg

SEQ ID NO: 3421 - DNA, 22 bp, homo sapiens
  tDNA103_PheGAA_6_-_28791093_28791166@1.22.22,tDNA
gccgaaatagctcagttgggag

SEQ ID NO: 3422 - DNA, 23 bp, homo sapiens
  tDNA103_PheGAA_6_-_28791093_28791166@1.23.23,tDNA
gccgaaatagctcagttgggaga

SEQ ID NO: 3423 - DNA, 24 bp, homo sapiens
  tDNA103_PheGAA_6_-_28791093_28791166@1.24.24,tDNA
gccgaaatagctcagttgggagag

SEQ ID NO: 3424 - DNA, 18 bp, homo sapiens
  tDNA1_ArgCCG_16_+_3200675_3200747@2.19.18,tDNA114
gccgcgtggcctaatgga

SEQ ID NO: 3425 - DNA, 22 bp, homo sapiens
  tDNA111_HisGTG_1_-_147774845_147774916@1.22.22,tr
gccgtgatcgtatagtggttag

SEQ ID NO: 3426 - DNA, 23 bp, homo sapiens
  tDNA111_HisGTG_1_-_147774845_147774916@1.23.23,tr
gccgtgatcgtatagtggttagt

SEQ ID NO: 3427 - DNA, 24 bp, homo sapiens
  tDNA111_HisGTG_1_-_147774845_147774916@1.24.24,tr
gccgtgatcgtatagtggttagta

SEQ ID NO: 3428 - DNA, 27 bp, homo sapiens
  tDNA111_HisGTG_1_-_147774845_147774916@1.27.27,tr
gccgtgatcgtatagtggttagtactc

SEQ ID NO: 3429 - DNA, 28 bp, homo sapiens
  tDNA111_HisGTG_1_-_147774845_147774916@1.28.28,tr
gccgtgatcgtatagtggttagtactct

SEQ ID NO: 3430 - DNA, 30 bp, homo sapiens
  tDNA111_HisGTG_1_-_147774845_147774916@1.30.30,tr
gccgtgatcgtatagtggttagtactctgc

SEQ ID NO: 3431 - DNA, 18 bp, homo sapiens
  tDNA22_MetCAT_16_-_87417628_87417700@59.76.18
gcctcacacggggcacca

SEQ ID NO: 3432 - DNA, 25 bp, homo sapiens
  tDNA12_ArgCCT_16_+_3243918_3243990@30.54.25,tDNA3
gcctcctaagccagggattgtgggt

SEQ ID NO: 3433 - DNA, 18 bp, homo sapiens
  tDNA22_MetCAT_16_-_87417628_87417700@1.18.18,tDNA
gcctcgttagcgcagtag

SEQ ID NO: 3434 - DNA, 19 bp, homo sapiens
  tDNA22_MetCAT_16_-_87417628_87417700@1.19.19,tDNA
gcctcgttagcgcagtagg

SEQ ID NO: 3435 - DNA, 21 bp, homo sapiens
  tDNA10_MetCAT_8_-_124169470_124169542@1.21.21
gcctcgttagcgcagtaggta

SEQ ID NO: 3436 - DNA, 22 bp, homo sapiens
  tDNA10_MetCAT_8_-_124169470_124169542@1.22.22
gcctcgttagcgcagtaggtag

SEQ ID NO: 3437 - DNA, 24 bp, homo sapiens
  tDNA10_MetCAT_8_-_124169470_124169542@1.24.24
gcctcgttagcgcagtaggtagcg

SEQ ID NO: 3438 - DNA, 17 bp, homo sapiens
  tDNAMT_TyrGTA_MT_-_5826_5891@53.69.17
gcctctttttaccacca

SEQ ID NO: 3439 - DNA, 19 bp, homo sapiens
  tDNA143_LysTTT_6_-_27559593_27559665@1.19.19
gcctggatagctcagtcgg

SEQ ID NO: 3440 - DNA, 24 bp, homo sapiens
  tDNA143_LysTTT_6_-_27559593_27559665@1.24.24
gcctggatagctcagtcggtagag

SEQ ID NO: 3441 - DNA, 19 bp, homo sapiens
  tDNA5_LysCTT_16_+_3214939_3215011@1.19.19
gcctggctagctcagtcgg

SEQ ID NO: 3442 - DNA, 19 bp, homo sapiens
  tDNA118_LysTTT_6_-_28660987_28661060@1.19.19,tDNA
gcctgggtagctcagtcgg

SEQ ID NO: 3443 - DNA, 21 bp, homo sapiens
  tDNA82_GlyTCC_1_-_161409961_161410032@30.50.21,tr
gccttccaagcagttgacccg

SEQ ID NO: 3444 - DNA, 30 bp, homo sapiens
  tDNA2_GlyCCC_1_+_17053780_17053850@1.30.30
gccttggtggtgcagtggtagaattctcgc

SEQ ID NO: 3445 - DNA, 16 bp, homo sapiens
  tDNA34_GlyCCC_16_-_686736_686806@1.16.16,tDNA27_G
gcgccgctggtgtagt

SEQ ID NO: 3446 - DNA, 17 bp, homo sapiens
  tDNA34_GlyCCC_16_-_686736_686806@1.17.17,tDNA27_G
gcgccgctggtgtagtg

SEQ ID NO: 3447 - DNA, 18 bp, homo sapiens
  tDNA34_GlyCCC_16_-_686736_686806@1.18.18,tDNA27_G
gcgccgctggtgtagtgg

SEQ ID NO: 3448 - DNA, 20 bp, homo sapiens
  tDNA34_GlyCCC_16_-_686736_686806@1.20.20,tDNA27_G
gcgccgctggtgtagtggta

SEQ ID NO: 3449 - DNA, 22 bp, homo sapiens
  tDNA34_GlyCCC_16_-_686736_686806@1.22.22,tDNA27_G
gcgccgctggtgtagtggtatc

SEQ ID NO: 3450 - DNA, 25 bp, homo sapiens
  tDNA34_GlyCCC_16_-_686736_686806@1.25.25,tDNA27_G
gcgccgctggtgtagtggtatcatg

SEQ ID NO: 3451 - DNA, 26 bp, homo sapiens
  tDNA34_GlyCCC_16_-_686736_686806@1.26.26,tDNA27_G
gcgccgctggtgtagtggtatcatgc

SEQ ID NO: 3452 - DNA, 27 bp, homo sapiens
  tDNA34_GlyCCC_16_-_686736_686806@1.27.27,tDNA27_G
gcgccgctggtgtagtggtatcatgca

SEQ ID NO: 3453 - DNA, 29 bp, homo sapiens
  tDNA34_GlyCCC_16_-_686736_686806@1.29.29,tDNA27_G
gcgccgctggtgtagtggtatcatgcaag

SEQ ID NO: 3454 - DNA, 21 bp, homo sapiens
  tDNA59_GluCTC_1_+_249168447_249168518@29.49.21,tr
gcgctctcaccgccgcggccc

SEQ ID NO: 3455 - DNA, 30 bp, homo sapiens
  tDNA144_AspGTC_6_-_27551236_27551307@39.68.30,trn
gcgggagaccggggttcgattccccgacgg

SEQ ID NO: 3456 - DNA, 17 bp, homo sapiens
  tDNA3_GluTTC_13_-_45492062_45492133@15.31.17,tDNA
gcggttaggattcctgg

SEQ ID NO: 3457 - DNA, 18 bp, homo sapiens
  tDNA3_GluTTC_13_-_45492062_45492133@15.32.18,tDNA
gcggttaggattcctggt

SEQ ID NO: 3458 - DNA, 19 bp, homo sapiens
  tDNA3_GluTTC_13_-_45492062_45492133@15.33.19,tDNA
gcggttaggattcctggtt

SEQ ID NO: 3459 - DNA, 21 bp, homo sapiens
  tDNA3_GluTTC_13_-_45492062_45492133@15.35.21,tDNA
gcggttaggattcctggtttt

SEQ ID NO: 3460 - DNA, 21 bp, homo sapiens
  tDNA17_LeuCAG_16_+_57333863_57333945@30.50.21,trn
gcgttcaggtcgcagtctccc

SEQ ID NO: 3461 - DNA, 16 bp, homo sapiens
  tDNA82_GlyTCC_1_-_161409961_161410032@1.16.16,trn
gcgttggtggtatagt

SEQ ID NO: 3462 - DNA, 17 bp, homo sapiens
  tDNA82_GlyTCC_1_-_161409961_161410032@1.17.17,trn
gcgttggtggtatagtg

SEQ ID NO: 3463 - DNA, 18 bp, homo sapiens
  tDNA82_GlyTCC_1_-_161409961_161410032@1.18.18,trn
gcgttggtggtatagtgg

SEQ ID NO: 3464 - DNA, 19 bp, homo sapiens
  tDNA82_GlyTCC_1_-_161409961_161410032@1.19.19,trn
gcgttggtggtatagtggt

SEQ ID NO: 3465 - DNA, 20 bp, homo sapiens
  tDNA10_GlyTCC_17_+_8124866_8124937@1.20.20
gcgttggtggtatagtggta

SEQ ID NO: 3466 - DNA, 22 bp, homo sapiens
  tDNA10_GlyTCC_17_+_8124866_8124937@1.22.22
gcgttggtggtatagtggtaag

SEQ ID NO: 3467 - DNA, 23 bp, homo sapiens
  tDNA10_GlyTCC_17_+_8124866_8124937@1.23.23
gcgttggtggtatagtggtaagc

SEQ ID NO: 3468 - DNA, 24 bp, homo sapiens
  tDNA10_GlyTCC_17_+_8124866_8124937@1.24.24
gcgttggtggtatagtggtaagca

SEQ ID NO: 3469 - DNA, 25 bp, homo sapiens
  tDNA10_GlyTCC_17_+_8124866_8124937@1.25.25
gcgttggtggtatagtggtaagcat

SEQ ID NO: 3470 - DNA, 26 bp, homo sapiens
  tDNA10_GlyTCC_17_+_8124866_8124937@1.26.26
gcgttggtggtatagtggtaagcata

SEQ ID NO: 3471 - DNA, 27 bp, homo sapiens
  tDNA10_GlyTCC_17_+_8124866_8124937@1.27.27
gcgttggtggtatagtggtaagcatag

SEQ ID NO: 3472 - DNA, 28 bp, homo sapiens
  tDNA10_GlyTCC_17_+_8124866_8124937@1.28.28
gcgttggtggtatagtggtaagcatagc

SEQ ID NO: 3473 - DNA, 30 bp, homo sapiens
  tDNA10_GlyTCC_17_+_8124866_8124937@1.30.30
gcgttggtggtatagtggtaagcatagctg

SEQ ID NO: 3474 - DNA, 20 bp, homo sapiens
  tDNA82_GlyTCC_1_-_161409961_161410032@1.20.20,trn
gcgttggtggtatagtggtg

SEQ ID NO: 3475 - DNA, 21 bp, homo sapiens
  tDNA82_GlyTCC_1_-_161409961_161410032@1.21.21,trn
gcgttggtggtatagtggtga

SEQ ID NO: 3476 - DNA, 22 bp, homo sapiens
  tDNA82_GlyTCC_1_-_161409961_161410032@1.22.22,trn
gcgttggtggtatagtggtgag

SEQ ID NO: 3477 - DNA, 23 bp, homo sapiens
  tDNA82_GlyTCC_1_-_161409961_161410032@1.23.23,trn
gcgttggtggtatagtggtgagc

SEQ ID NO: 3478 - DNA, 24 bp, homo sapiens
  tDNA82_GlyTCC_1_-_161409961_161410032@1.24.24,trn
gcgttggtggtatagtggtgagca

SEQ ID NO: 3479 - DNA, 25 bp, homo sapiens
  tDNA82_GlyTCC_1_-_161409961_161410032@1.25.25,trn
gcgttggtggtatagtggtgagcat

SEQ ID NO: 3480 - DNA, 26 bp, homo sapiens
  tDNA82_GlyTCC_1_-_161409961_161410032@1.26.26,trn
gcgttggtggtatagtggtgagcata

SEQ ID NO: 3481 - DNA, 27 bp, homo sapiens
  tDNA82_GlyTCC_1_-_161409961_161410032@1.27.27,trn
gcgttggtggtatagtggtgagcatag

SEQ ID NO: 3482 - DNA, 28 bp, homo sapiens
  tDNA117_GlyTCC_1_-_145397864_145397935@1.28.28,tr
gcgttggtggtatagtggtgagcatagc

SEQ ID NO: 3483 - DNA, 29 bp, homo sapiens
  tDNA117_GlyTCC_1_-_145397864_145397935@1.29.29,tr
gcgttggtggtatagtggtgagcatagct

SEQ ID NO: 3484 - DNA, 30 bp, homo sapiens
  tDNA117_GlyTCC_1_-_145397864_145397935@1.30.30,tr
gcgttggtggtatagtggtgagcatagctg

SEQ ID NO: 3485 - DNA, 20 bp, homo sapiens
  tDNA2_GlyTCC_19_+_4724082_4724153@1.20.20
gcgttggtggtatagtggtt

SEQ ID NO: 3486 - DNA, 22 bp, homo sapiens
  tDNA2_GlyTCC_19_+_4724082_4724153@1.22.22
gcgttggtggtatagtggttag

SEQ ID NO: 3487 - DNA, 23 bp, homo sapiens
  tDNA2_GlyTCC_19_+_4724082_4724153@1.23.23
gcgttggtggtatagtggttagc

SEQ ID NO: 3488 - DNA, 24 bp, homo sapiens
  tDNA2_GlyTCC_19_+_4724082_4724153@1.24.24
gcgttggtggtatagtggttagca

SEQ ID NO: 3489 - DNA, 25 bp, homo sapiens
  tDNA2_GlyTCC_19_+_4724082_4724153@1.25.25
gcgttggtggtatagtggttagcat

SEQ ID NO: 3490 - DNA, 26 bp, homo sapiens
  tDNA2_GlyTCC_19_+_4724082_4724153@1.26.26
gcgttggtggtatagtggttagcata

SEQ ID NO: 3491 - DNA, 27 bp, homo sapiens
  tDNA2_GlyTCC_19_+_4724082_4724153@1.27.27
gcgttggtggtatagtggttagcatag

SEQ ID NO: 3492 - DNA, 28 bp, homo sapiens
  tDNA2_GlyTCC_19_+_4724082_4724153@1.28.28
gcgttggtggtatagtggttagcatagc

SEQ ID NO: 3493 - DNA, 30 bp, homo sapiens
  tDNA2_GlyTCC_19_+_4724082_4724153@1.30.30
gcgttggtggtatagtggttagcatagctg

SEQ ID NO: 3494 - DNA, 21 bp, homo sapiens
  tDNAMT_MetCAT_MT_+_4402_4469@11.31.21
gctaaataagctatcgggccc

SEQ ID NO: 3495 - DNA, 22 bp, homo sapiens
  tDNAMT_AspGTC_MT_+_7518_7585@49.70.22
gctaaatcctatatatcttacc

SEQ ID NO: 3496 - DNA, 23 bp, homo sapiens
  tDNAMT_AspGTC_MT_+_7518_7585@49.71.23
gctaaatcctatatatcttacca

SEQ ID NO: 3497 - DNA, 19 bp, homo sapiens
  tDNAMT_SerGCT_MT_+_12207_12265@20.38.19
gctaactcatgcccccatg

SEQ ID NO: 3498 - DNA, 21 bp, homo sapiens
  tDNAMT_SerGCT_MT_+_12207_12265@20.40.21
gctaactcatgcccccatgtc

SEQ ID NO: 3499 - DNA, 22 bp, homo sapiens
  tDNAMT_SerGCT_MT_+_12207_12265@20.41.22
gctaactcatgcccccatgtct

SEQ ID NO: 3500 - DNA, 23 bp, homo sapiens
  tDNAMT_SerGCT_MT_+_12207_12265@20.42.23
gctaactcatgcccccatgtcta

SEQ ID NO: 3501 - DNA, 16 bp, homo sapiens
  tDNAMT_ProTGG_MT_-_15956_16023@37.52.16
gctaatggtggagtta

SEQ ID NO: 3502 - DNA, 17 bp, homo sapiens
  tDNAMT_ProTGG_MT_-_15956_16023@37.53.17
gctaatggtggagttaa

SEQ ID NO: 3503 - DNA, 19 bp, homo sapiens
  tDNAMT_ProTGG_MT_-_15956_16023@37.55.19
gctaatggtggagttaaag

SEQ ID NO: 3504 - DNA, 21 bp, homo sapiens
  tDNAMT_ProTGG_MT_-_15956_16023@37.57.21
gctaatggtggagttaaagac

SEQ ID NO: 3505 - DNA, 22 bp, homo sapiens
  tDNAMT_ProTGG_MT_-_15956_16023@37.58.22
gctaatggtggagttaaagact

SEQ ID NO: 3506 - DNA, 30 bp, homo sapiens
  tDNAMT_ProTGG_MT_-_15956_16023@37.66.30
gctaatggtggagttaaagactttttctct

SEQ ID NO: 3507 - DNA, 21 bp, homo sapiens
  tDNAMT_LeuTAG_MT_+_12266_12336@18.38.21
gctatccattggtcttaggcc

SEQ ID NO: 3508 - DNA, 22 bp, homo sapiens
  tDNAMT_LeuTAG_MT_+_12266_12336@18.39.22
gctatccattggtcttaggccc

SEQ ID NO: 3509 - DNA, 23 bp, homo sapiens
  tDNAMT_LeuTAG_MT_+_12266_12336@18.40.23
gctatccattggtcttaggcccc

SEQ ID NO: 3510 - DNA, 18 bp, homo sapiens
  tDNAMT_SerGCT_MT_+_12207_12265@7.24.18
gctcacaagaactgctaa

SEQ ID NO: 3511 - DNA, 19 bp, homo sapiens
  tDNAMT_SerGCT_MT_+_12207_12265@7.25.19
gctcacaagaactgctaac

SEQ ID NO: 3512 - DNA, 20 bp, homo sapiens
  tDNAMT_SerGCT_MT_+_12207_12265@7.26.20
gctcacaagaactgctaact

SEQ ID NO: 3513 - DNA, 21 bp, homo sapiens
  tDNAMT_SerGCT_MT_+_12207_12265@7.27.21
gctcacaagaactgctaactc

SEQ ID NO: 3514 - DNA, 24 bp, homo sapiens
  tDNAMT_SerGCT_MT_+_12207_12265@7.30.24
gctcacaagaactgctaactcatg

SEQ ID NO: 3515 - DNA, 18 bp, homo sapiens
  tDNAMT_PheGAA_MT_+_577_647@51.68.18
gctcacatcaccccataa

SEQ ID NO: 3516 - DNA, 19 bp, homo sapiens
  tDNAMT_PheGAA_MT_+_577_647@51.69.19
gctcacatcaccccataaa

SEQ ID NO: 3517 - DNA, 20 bp, homo sapiens
  tDNAMT_PheGAA_MT_+_577_647@51.70.20
gctcacatcaccccataaac

SEQ ID NO: 3518 - DNA, 21 bp, homo sapiens
  tDNAMT_PheGAA_MT_+_577_647@51.71.21
gctcacatcaccccataaaca

SEQ ID NO: 3519 - DNA, 23 bp, homo sapiens
  tDNAMT_PheGAA_MT_+_577_647@51.73.23
gctcacatcaccccataaacacc

SEQ ID NO: 3520 - DNA, 24 bp, homo sapiens
  tDNAMT_PheGAA_MT_+_577_647@51.74.24
gctcacatcaccccataaacacca

SEQ ID NO: 3521 - DNA, 21 bp, homo sapiens
  tDNA149_LysTTT_6_-_27302769_27302841@10.30.21,trn
gctcagtcggtagagcatcag

SEQ ID NO: 3522 - DNA, 23 bp, homo sapiens
  tDNA7_CysGCA_3_-_131947944_131948015@10.32.23,trn
gctcagtggtagagcatttgact

SEQ ID NO: 3523 - DNA, 24 bp, homo sapiens
  tDNA7_CysGCA_3_-_131947944_131948015@10.33.24,trn
gctcagtggtagagcatttgactg

SEQ ID NO: 3524 - DNA, 25 bp, homo sapiens
  tDNA7_CysGCA_3_-_131947944_131948015@10.34.25,trn
gctcagtggtagagcatttgactgc

SEQ ID NO: 3525 - DNA, 16 bp, homo sapiens
  tDNA126_LeuAAG_6_-_28446400_28446481@38.53.16,trn
gctccagtctcttcgg

SEQ ID NO: 3526 - DNA, 23 bp, homo sapiens
  tDNA16_LeuAAG_5_-_180601044_180601125@38.60.23,tr
gctccagtctcttcggaggcgtg

SEQ ID NO: 3527 - DNA, 17 bp, homo sapiens
  tDNA126_LeuAAG_6_-_28446400_28446481@38.54.17,trn
gctccagtctcttcggg

SEQ ID NO: 3528 - DNA, 19 bp, homo sapiens
  tDNA126_LeuAAG_6_-_28446400_28446481@38.56.19,trn
gctccagtctcttcggggg

SEQ ID NO: 3529 - DNA, 20 bp, homo sapiens
  tDNA126_LeuAAG_6_-_28446400_28446481@38.57.20,trn
gctccagtctcttcgggggc

SEQ ID NO: 3530 - DNA, 23 bp, homo sapiens
  tDNA126_LeuAAG_6_-_28446400_28446481@38.60.23,trn
gctccagtctcttcgggggcgtg

SEQ ID NO: 3531 - DNA, 24 bp, homo sapiens
  tDNA126_LeuAAG_6_-_28446400_28446481@38.61.24,trn
gctccagtctcttcgggggcgtgg

SEQ ID NO: 3532 - DNA, 19 bp, homo sapiens
  tDNA29_IleTAT_6_+_26988125_26988218@1.19.19,tDNA5
gctccagtggcgcaatcgg

SEQ ID NO: 3533 - DNA, 20 bp, homo sapiens
  tDNA29_IleTAT_6_+_26988125_26988218@1.20.20,tDNA5
gctccagtggcgcaatcggt

SEQ ID NO: 3534 - DNA, 23 bp, homo sapiens
  tDNA29_IleTAT_6_+_26988125_26988218@1.23.23,tDNA5
gctccagtggcgcaatcggttag

SEQ ID NO: 3535 - DNA, 18 bp, homo sapiens
  tDNAMT_CysGCA_MT_-_5761_5826@2.19.18
gctccgaggtgattttca

SEQ ID NO: 3536 - DNA, 20 bp, homo sapiens
  tDNAMT_CysGCA_MT_-_5761_5826@2.21.20
gctccgaggtgattttcata

SEQ ID NO: 3537 - DNA, 22 bp, homo sapiens
  tDNAMT_CysGCA_MT_-_5761_5826@2.23.22
gctccgaggtgattttcatatt

SEQ ID NO: 3538 - DNA, 23 bp, homo sapiens
  tDNAMT_CysGCA_MT_-_5761_5826@2.24.23
gctccgaggtgattttcatattg

SEQ ID NO: 3539 - DNA, 18 bp, homo sapiens
  tDNA9_ArgTCT_1_+_94313129_94313213@2.19.18
gctccgtggcgcaatgga

SEQ ID NO: 3540 - DNA, 19 bp, homo sapiens
  tDNA59_GluCTC_1_+_249168447_249168518@31.49.19,tr
gctctcaccgccgcggccc

SEQ ID NO: 3541 - DNA, 23 bp, homo sapiens
  tDNA59_GluCTC_1_+_249168447_249168518@31.53.23,tr
gctctcaccgccgcggcccgggt

SEQ ID NO: 3542 - DNA, 19 bp, homo sapiens
  tDNAMT_TyrGTA_MT_-_5826_5891@10.28.19
gctgagtgaagcattggac

SEQ ID NO: 3543 - DNA, 21 bp, homo sapiens
  tDNAMT_TyrGTA_MT_-_5826_5891@10.30.21
gctgagtgaagcattggactg

SEQ ID NO: 3544 - DNA, 22 bp, homo sapiens
  tDNAMT_TyrGTA_MT_-_5826_5891@10.31.22
gctgagtgaagcattggactgt

SEQ ID NO: 3545 - DNA, 23 bp, homo sapiens
  tDNAMT_TyrGTA_MT_-_5826_5891@10.32.23
gctgagtgaagcattggactgta

SEQ ID NO: 3546 - DNA, 24 bp, homo sapiens
  tDNAMT_TyrGTA_MT_-_5826_5891@10.33.24
gctgagtgaagcattggactgtaa

SEQ ID NO: 3547 - DNA, 25 bp, homo sapiens
  tDNAMT_TyrGTA_MT_-_5826_5891@10.34.25
gctgagtgaagcattggactgtaaa

SEQ ID NO: 3548 - DNA, 24 bp, homo sapiens
  tDNA10_GlyTCC_17_+_8124866_8124937@27.50.24,tDNA1
gctgccttccaagcagttgacccg

SEQ ID NO: 3549 - DNA, 25 bp, homo sapiens
  tDNA10_GlyTCC_17_+_8124866_8124937@27.51.25,tDNA1
gctgccttccaagcagttgacccgg

SEQ ID NO: 3550 - DNA, 23 bp, homo sapiens
  tDNA19_TyrGTA_14_-_21121258_21121351@15.37.23,trn
gctggtagagcggaggactgtag

SEQ ID NO: 3551 - DNA, 25 bp, homo sapiens
  tDNA35_SerCGA_6_+_27177628_27177709@1.25.25,tDNA4
gctgtgatggccgagtggttaaggc

SEQ ID NO: 3552 - DNA, 24 bp, homo sapiens
  tDNA103_AsnGTT_1_-_149230570_149230643@32.55.24,t
gctgttaaccgaaaggttggtggt

SEQ ID NO: 3553 - DNA, 21 bp, homo sapiens
  tDNAMT_IleGAT_MT_+_4263_4331@49.69.21
gcttaaacccccttatttcta

SEQ ID NO: 3554 - DNA, 23 bp, homo sapiens
  tDNAMT_IleGAT_MT_+_4263_4331@49.71.23
gcttaaacccccttatttctacc

SEQ ID NO: 3555 - DNA, 24 bp, homo sapiens
  tDNAMT_IleGAT_MT_+_4263_4331@49.72.24
gcttaaacccccttatttctacca

SEQ ID NO: 3556 - DNA, 23 bp, homo sapiens
  tDNAMT_HisGTG_MT_+_12138_12206@49.71.23
gcttacgaccccttatttacccc

SEQ ID NO: 3557 - DNA, 24 bp, homo sapiens
  tDNAMT_HisGTG_MT_+_12138_12206@49.72.24
gcttacgaccccttatttacccca

SEQ ID NO: 3558 - DNA, 22 bp, homo sapiens
  tDNAMT_CysGCA_MT_-_5761_5826@46.67.22
gcttcaaacctgccggggcttc

SEQ ID NO: 3559 - DNA, 23 bp, homo sapiens
  tDNAMT_CysGCA_MT_-_5761_5826@46.68.23
gcttcaaacctgccggggcttcc

SEQ ID NO: 3560 - DNA, 24 bp, homo sapiens
  tDNAMT_CysGCA_MT_-_5761_5826@46.69.24
gcttcaaacctgccggggcttcca

SEQ ID NO: 3561 - DNA, 20 bp, homo sapiens
  tDNA3_ValCAC_20_+_43951001_43951073@1.20.20
gcttctgtaatgtagtggtt

SEQ ID NO: 3562 - DNA, 17 bp, homo sapiens
  tDNA152_ValCAC_6_-_27248049_27248121@1.17.17
gcttctgtagtgtagtg

SEQ ID NO: 3563 - DNA, 18 bp, homo sapiens
  tDNA152_ValCAC_6_-_27248049_27248121@1.18.18
gcttctgtagtgtagtgg

SEQ ID NO: 3564 - DNA, 19 bp, homo sapiens
  tDNA152_ValCAC_6_-_27248049_27248121@1.19.19
gcttctgtagtgtagtggt

SEQ ID NO: 3565 - DNA, 20 bp, homo sapiens
  tDNA152_ValCAC_6_-_27248049_27248121@1.20.20
gcttctgtagtgtagtggtt

SEQ ID NO: 3566 - DNA, 22 bp, homo sapiens
  tDNA152_ValCAC_6_-_27248049_27248121@1.22.22
gcttctgtagtgtagtggttat

SEQ ID NO: 3567 - DNA, 23 bp, homo sapiens
  tDNA152_ValCAC_6_-_27248049_27248121@1.23.23
gcttctgtagtgtagtggttatc

SEQ ID NO: 3568 - DNA, 24 bp, homo sapiens
  tDNA152_ValCAC_6_-_27248049_27248121@1.24.24
gcttctgtagtgtagtggttatca

SEQ ID NO: 3569 - DNA, 25 bp, homo sapiens
  tDNA152_ValCAC_6_-_27248049_27248121@1.25.25
gcttctgtagtgtagtggttatcac

SEQ ID NO: 3570 - DNA, 26 bp, homo sapiens
  tDNA152_ValCAC_6_-_27248049_27248121@1.26.26
gcttctgtagtgtagtggttatcacg

SEQ ID NO: 3571 - DNA, 30 bp, homo sapiens
  tDNA152_ValCAC_6_-_27248049_27248121@1.30.30
gcttctgtagtgtagtggttatcacgttcg

SEQ ID NO: 3572 - DNA, 25 bp, homo sapiens
  tDNA8_AlaTGC_12_+_125424512_125424583@29.53.25
gctttgcacgtatgaggccccgggt

SEQ ID NO: 3573 - DNA, 24 bp, homo sapiens
  tDNAMT_ProTGG_MT_-_15956_16023@28.51.24
gctttgggtgctaatggtggagtt

SEQ ID NO: 3574 - DNA, 16 bp, homo sapiens
  tDNA3_GlnCTG_12_+_74851182_74851254@29.44.16,tDNA
ggactctgaatccagc

SEQ ID NO: 3575 - DNA, 17 bp, homo sapiens
  tDNA131_GlnCTG_6_-_27759135_27759206@29.45.17,trn
ggactctgaatccagcg

SEQ ID NO: 3576 - DNA, 18 bp, homo sapiens
  tDNA131_GlnCTG_6_-_27759135_27759206@29.46.18,trn
ggactctgaatccagcga

SEQ ID NO: 3577 - DNA, 19 bp, homo sapiens
  tDNA131_GlnCTG_6_-_27759135_27759206@29.47.19,trn
ggactctgaatccagcgat

SEQ ID NO: 3578 - DNA, 20 bp, homo sapiens
  tDNA131_GlnCTG_6_-_27759135_27759206@29.48.20,trn
ggactctgaatccagcgatc

SEQ ID NO: 3579 - DNA, 21 bp, homo sapiens
  tDNA131_GlnCTG_6_-_27759135_27759206@29.49.21,trn
ggactctgaatccagcgatcc

SEQ ID NO: 3580 - DNA, 22 bp, homo sapiens
  tDNA131_GlnCTG_6_-_27759135_27759206@29.50.22,trn
ggactctgaatccagcgatccg

SEQ ID NO: 3581 - DNA, 23 bp, homo sapiens
  tDNA131_GlnCTG_6_-_27759135_27759206@29.51.23,trn
ggactctgaatccagcgatccga

SEQ ID NO: 3582 - DNA, 24 bp, homo sapiens
  tDNA131_GlnCTG_6_-_27759135_27759206@29.52.24,trn
ggactctgaatccagcgatccgag

SEQ ID NO: 3583 - DNA, 25 bp, homo sapiens
  tDNA131_GlnCTG_6_-_27759135_27759206@29.53.25,trn
ggactctgaatccagcgatccgagt

SEQ ID NO: 3584 - DNA, 20 bp, homo sapiens
  tDNAMT_TyrGTA_MT_-_5826_5891@25.44.20
ggactgtaaatctaaagaca

SEQ ID NO: 3585 - DNA, 22 bp, homo sapiens
  tDNA19_TyrGTA_14_-_21121258_21121351@29.50.22,trn
ggactgtagatccttaggtcgc

SEQ ID NO: 3586 - DNA, 23 bp, homo sapiens
  tDNAMT_ThrTGT_MT_+_15888_15953@40.62.23
ggagatgaaaacctttttccaag

SEQ ID NO: 3587 - DNA, 29 bp, homo sapiens
  tDNAMT_ThrTGT_MT_+_15888_15953@40.68.29
ggagatgaaaacctttttccaaggacacc

SEQ ID NO: 3588 - DNA, 23 bp, homo sapiens
  tDNAMT_ValTAC_MT_+_1602_1670@40.62.23
ggagatttcaacttaacttgacc

SEQ ID NO: 3589 - DNA, 24 bp, homo sapiens
  tDNAMT_ValTAC_MT_+_1602_1670@40.63.24
ggagatttcaacttaacttgaccg

SEQ ID NO: 3590 - DNA, 25 bp, homo sapiens
  tDNAMT_ValTAC_MT_+_1602_1670@40.64.25
ggagatttcaacttaacttgaccgc

SEQ ID NO: 3591 - DNA, 26 bp, homo sapiens
  tDNAMT_ValTAC_MT_+_1602_1670@40.65.26
ggagatttcaacttaacttgaccgct

SEQ ID NO: 3592 - DNA, 27 bp, homo sapiens
  tDNAMT_ValTAC_MT_+_1602_1670@40.66.27
ggagatttcaacttaacttgaccgctc

SEQ ID NO: 3593 - DNA, 28 bp, homo sapiens
  tDNAMT_ValTAC_MT_+_1602_1670@40.67.28
ggagatttcaacttaacttgaccgctct

SEQ ID NO: 3594 - DNA, 29 bp, homo sapiens
  tDNAMT_ValTAC_MT_+_1602_1670@40.68.29
ggagatttcaacttaacttgaccgctctg

SEQ ID NO: 3595 - DNA, 19 bp, homo sapiens
  tDNA23_ArgCCG_17_-_66016013_66016085@36.54.19
ggagctggggattgtgggt

SEQ ID NO: 3596 - DNA, 27 bp, homo sapiens
  tDNAMT_IleGAT_MT_+_4263_4331@46.72.27
ggagcttaaacccccttatttctacca

SEQ ID NO: 3597 - DNA, 24 bp, homo sapiens
  tDNAMT_ProTGG_MT_-_15956_16023@46.69.24
ggagttaaagactttttctctgac

SEQ ID NO: 3598 - DNA, 25 bp, homo sapiens
  tDNAMT_ProTGG_MT_-_15956_16023@46.70.25
ggagttaaagactttttctctgacc

SEQ ID NO: 3599 - DNA, 26 bp, homo sapiens
  tDNAMT_ProTGG_MT_-_15956_16023@46.71.26
ggagttaaagactttttctctgacca

SEQ ID NO: 3600 - DNA, 24 bp, homo sapiens
  tDNAMT_LeuTAG_MT_+_12266_12336@10.33.24
ggataacagctatccattggtctt

SEQ ID NO: 3601 - DNA, 22 bp, homo sapiens
  tDNA11_ArgACG_3_-_45730491_45730563@17.38.22,tDNA
ggataacgcgtctgactacgga

SEQ ID NO: 3602 - DNA, 25 bp, homo sapiens
  tDNA32_MetCAT_1_+_153643726_153643797@51.75.25,tr
ggatcgaaaccatcctctgctacca

SEQ ID NO: 3603 - DNA, 27 bp, homo sapiens
  tDNAMT_GlnTTG_MT_-_4329_4400@3.29.27,tDNAlookalik
ggatggggtgtgataggtggcacggag

SEQ ID NO: 3604 - DNA, 20 bp, homo sapiens
  tDNA120_AlaAGC_6_-_28626014_28626085@3.22.20,tDNA
ggatgtagctcagtggtaga

SEQ ID NO: 3605 - DNA, 19 bp, homo sapiens
  tDNA3_GluTTC_13_-_45492062_45492133@22.40.19,tDNA
ggattcctggttttcaccc

SEQ ID NO: 3606 - DNA, 19 bp, homo sapiens
  tDNA131_GlnCTG_6_-_27759135_27759206@1.19.19,tDNA
ggccccatggtgtaatggt

SEQ ID NO: 3607 - DNA, 30 bp, homo sapiens
  tDNA131_GlnCTG_6_-_27759135_27759206@1.30.30
ggccccatggtgtaatggtcagcactctgg

SEQ ID NO: 3608 - DNA, 22 bp, homo sapiens
  tDNA130_GlnTTG_6_-_27763640_27763711@1.22.22,tDNA
ggccccatggtgtaatggttag

SEQ ID NO: 3609 - DNA, 30 bp, homo sapiens
  tDNA130_GlnTTG_6_-_27763640_27763711@1.30.30,tDNA
ggccccatggtgtaatggttagcactctgg

SEQ ID NO: 3610 - DNA, 19 bp, homo sapiens
  tDNA34_ThrAGT_6_+_27130050_27130123@1.19.19
ggccctgtggcttagctgg

SEQ ID NO: 3611 - DNA, 18 bp, homo sapiens
  tDNA1_ArgCCG_16_+_3200675_3200747@1.18.18,tDNA114
ggccgcgtggcctaatgg

SEQ ID NO: 3612 - DNA, 19 bp, homo sapiens
  tDNA1_ArgCCG_16_+_3200675_3200747@1.19.19,tDNA114
ggccgcgtggcctaatgga

SEQ ID NO: 3613 - DNA, 23 bp, homo sapiens
  tDNA1_ArgCCG_16_+_3200675_3200747@1.23.23,tDNA114
ggccgcgtggcctaatggataag

SEQ ID NO: 3614 - DNA, 24 bp, homo sapiens
  tDNA1_ArgCCG_16_+_3200675_3200747@1.24.24,tDNA114
ggccgcgtggcctaatggataagg

SEQ ID NO: 3615 - DNA, 25 bp, homo sapiens
  tDNA1_ArgCCG_16_+_3200675_3200747@1.25.25,tDNA114
ggccgcgtggcctaatggataaggc

SEQ ID NO: 3616 - DNA, 30 bp, homo sapiens
  tDNA1_ArgCCG_16_+_3200675_3200747@1.30.30,tDNA114
ggccgcgtggcctaatggataaggcgtctg

SEQ ID NO: 3617 - DNA, 20 bp, homo sapiens
  tDNA57_IleAAT_6_+_27636362_27636435@1.20.20
ggccggttagctcagtcggc

SEQ ID NO: 3618 - DNA, 19 bp, homo sapiens
  tDNA41_SerACT_6_+_27261671_27261744@1.19.19,tDNA1
ggccggttagctcagttgg

SEQ ID NO: 3619 - DNA, 20 bp, homo sapiens
  tDNA41_SerACT_6_+_27261671_27261744@1.20.20,tDNA1
ggccggttagctcagttggt

SEQ ID NO: 3620 - DNA, 19 bp, homo sapiens
  tDNA111_HisGTG_1_-_147774845_147774916@-1G.18.19,
ggccgtgatcgtatagtgg

SEQ ID NO: 3621 - DNA, 20 bp, homo sapiens
  tDNA111_HisGTG_1_-_147774845_147774916@-1G.19.20,
ggccgtgatcgtatagtggt

SEQ ID NO: 3622 - DNA, 21 bp, homo sapiens
  tDNA111_HisGTG_1_-_147774845_147774916@-1G.20.21,
ggccgtgatcgtatagtggtt

SEQ ID NO: 3623 - DNA, 22 bp, homo sapiens
  tDNA111_HisGTG_1_-_147774845_147774916@-1G.21.22,
ggccgtgatcgtatagtggtta

SEQ ID NO: 3624 - DNA, 23 bp, homo sapiens
  tDNA111_HisGTG_1_-_147774845_147774916@-1G.22.23,
ggccgtgatcgtatagtggttag

SEQ ID NO: 3625 - DNA, 24 bp, homo sapiens
  tDNA111_HisGTG_1_-_147774845_147774916@-1G.23.24,
ggccgtgatcgtatagtggttagt

SEQ ID NO: 3626 - DNA, 30 bp, homo sapiens
  tDNA111_HisGTG_1_-_147774845_147774916@-1G.29.30,
ggccgtgatcgtatagtggttagtactctg

SEQ ID NO: 3627 - DNA, 18 bp, homo sapiens
  tDNA39_TrpCCA_17_-_8124187_8124258@1.18.18
ggcctcgtggcgcaacgg

SEQ ID NO: 3628 - DNA, 19 bp, homo sapiens
  tDNA36_ThrAGT_17_-_8129553_8129626@1.19.19,tDNA8_
ggcgccgtggcttagttgg

SEQ ID NO: 3629 - DNA, 20 bp, homo sapiens
  tDNA36_ThrAGT_17_-_8129553_8129626@1.20.20,tDNA8_
ggcgccgtggcttagttggt

SEQ ID NO: 3630 - DNA, 18 bp, homo sapiens
  tDNA14_ThrCGT_17_+_29877093_29877164@1.18.18,tDNA
ggcgcggtggccaagtgg

SEQ ID NO: 3631 - DNA, 22 bp, homo sapiens
  tDNA14_ThrCGT_17_+_29877093_29877164@1.22.22,tDNA
ggcgcggtggccaagtggtaag

SEQ ID NO: 3632 - DNA, 23 bp, homo sapiens
  tDNA14_ThrCGT_17_+_29877093_29877164@1.23.23,tDNA
ggcgcggtggccaagtggtaagg

SEQ ID NO: 3633 - DNA, 24 bp, homo sapiens
  tDNA14_ThrCGT_17_+_29877093_29877164@1.24.24,tDNA
ggcgcggtggccaagtggtaaggc

SEQ ID NO: 3634 - DNA, 30 bp, homo sapiens
  tDNA14_ThrCGT_17_+_29877093_29877164@1.30.30,tDNA
ggcgcggtggccaagtggtaaggcgtcggt

SEQ ID NO: 3635 - DNA, 23 bp, homo sapiens
  tDNA59_GluCTC_1_+_249168447_249168518@28.50.23,tr
ggcgctctcaccgccgcggcccg

SEQ ID NO: 3636 - DNA, 23 bp, homo sapiens
  tDNA3_GluTTC_13_-_45492062_45492133@42.64.23,tDNA
ggcggcccgggttcgactcccgg

SEQ ID NO: 3637 - DNA, 24 bp, homo sapiens
  tDNAMT_AspGTC_MT_+_7518_7585@48.71.24
ggctaaatcctatatatcttacca

SEQ ID NO: 3638 - DNA, 18 bp, homo sapiens
  tDNAMT_PheGAA_MT_+_577_647@50.67.18
ggctcacatcaccccata

SEQ ID NO: 3639 - DNA, 21 bp, homo sapiens
  tDNAMT_PheGAA_MT_+_577_647@50.70.21
ggctcacatcaccccataaac

SEQ ID NO: 3640 - DNA, 22 bp, homo sapiens
  tDNAMT_PheGAA_MT_+_577_647@50.71.22
ggctcacatcaccccataaaca

SEQ ID NO: 3641 - DNA, 24 bp, homo sapiens
  tDNAMT_PheGAA_MT_+_577_647@50.73.24
ggctcacatcaccccataaacacc

SEQ ID NO: 3642 - DNA, 25 bp, homo sapiens
  tDNAMT_PheGAA_MT_+_577_647@50.74.25
ggctcacatcaccccataaacacca

SEQ ID NO: 3643 - DNA, 17 bp, homo sapiens
  tDNA126_LeuAAG_6_-_28446400_28446481@37.53.17,trn
ggctccagtctcttcgg

SEQ ID NO: 3644 - DNA, 21 bp, homo sapiens
  tDNA16_LeuAAG_5_-_180601044_180601125@37.57.21,tr
ggctccagtctcttcggaggc

SEQ ID NO: 3645 - DNA, 24 bp, homo sapiens
  tDNA16_LeuAAG_5_-_180601044_180601125@37.60.24,tr
ggctccagtctcttcggaggcgtg

SEQ ID NO: 3646 - DNA, 18 bp, homo sapiens
  tDNA126_LeuAAG_6_-_28446400_28446481@37.54.18,trn
ggctccagtctcttcggg

SEQ ID NO: 3647 - DNA, 20 bp, homo sapiens
  tDNA126_LeuAAG_6_-_28446400_28446481@37.56.20,trn
ggctccagtctcttcggggg

SEQ ID NO: 3648 - DNA, 21 bp, homo sapiens
  tDNA126_LeuAAG_6_-_28446400_28446481@37.57.21,trn
ggctccagtctcttcgggggc

SEQ ID NO: 3649 - DNA, 22 bp, homo sapiens
  tDNA126_LeuAAG_6_-_28446400_28446481@37.58.22,trn
ggctccagtctcttcgggggcg

SEQ ID NO: 3650 - DNA, 23 bp, homo sapiens
  tDNA126_LeuAAG_6_-_28446400_28446481@37.59.23,trn
ggctccagtctcttcgggggcgt

SEQ ID NO: 3651 - DNA, 24 bp, homo sapiens
  tDNA126_LeuAAG_6_-_28446400_28446481@37.60.24,trn
ggctccagtctcttcgggggcgtg

SEQ ID NO: 3652 - DNA, 25 bp, homo sapiens
  tDNA126_LeuAAG_6_-_28446400_28446481@37.61.25,trn
ggctccagtctcttcgggggcgtgg

SEQ ID NO: 3653 - DNA, 19 bp, homo sapiens
  tDNA13_ThrTGT_5_-_180618687_180618758@1.19.19,trn
ggctccatagctcaggggt

SEQ ID NO: 3654 - DNA, 18 bp, homo sapiens
  tDNA9_ArgTCT_1_+_94313129_94313213@1.18.18
ggctccgtggcgcaatgg

SEQ ID NO: 3655 - DNA, 19 bp, homo sapiens
  tDNA9_ArgTCT_1_+_94313129_94313213@1.19.19
ggctccgtggcgcaatgga

SEQ ID NO: 3656 - DNA, 23 bp, homo sapiens
  tDNA9_ArgTCT_1_+_94313129_94313213@1.23.23
ggctccgtggcgcaatggatagc

SEQ ID NO: 3657 - DNA, 20 bp, homo sapiens
  tDNA135_ThrAGT_6_-_27652474_27652547@1.20.20,tDNA
ggctccgtggcttagctggt

SEQ ID NO: 3658 - DNA, 16 bp, homo sapiens
  tDNA65_ProAGG_1_-_167684725_167684796@1.16.16,trn
ggctcgttggtctagg

SEQ ID NO: 3659 - DNA, 17 bp, homo sapiens
  tDNA65_ProAGG_1_-_167684725_167684796@1.17.17,trn
ggctcgttggtctaggg

SEQ ID NO: 3660 - DNA, 18 bp, homo sapiens
  tDNA65_ProAGG_1_-_167684725_167684796@1.18.18,trn
ggctcgttggtctagggg

SEQ ID NO: 3661 - DNA, 19 bp, homo sapiens
  tDNA65_ProAGG_1_-_167684725_167684796@1.19.19,trn
ggctcgttggtctaggggt

SEQ ID NO: 3662 - DNA, 20 bp, homo sapiens
  tDNA65_ProAGG_1_-_167684725_167684796@1.20.20,trn
ggctcgttggtctaggggta

SEQ ID NO: 3663 - DNA, 21 bp, homo sapiens
  tDNA65_ProAGG_1_-_167684725_167684796@1.21.21,trn
ggctcgttggtctaggggtat

SEQ ID NO: 3664 - DNA, 22 bp, homo sapiens
  tDNA65_ProAGG_1_-_167684725_167684796@1.22.22,trn
ggctcgttggtctaggggtatg

SEQ ID NO: 3665 - DNA, 23 bp, homo sapiens
  tDNA65_ProAGG_1_-_167684725_167684796@1.23.23,trn
ggctcgttggtctaggggtatga

SEQ ID NO: 3666 - DNA, 24 bp, homo sapiens
  tDNA65_ProAGG_1_-_167684725_167684796@1.24.24,trn
ggctcgttggtctaggggtatgat

SEQ ID NO: 3667 - DNA, 25 bp, homo sapiens
  tDNA65_ProAGG_1_-_167684725_167684796@1.25.25,trn
ggctcgttggtctaggggtatgatt

SEQ ID NO: 3668 - DNA, 26 bp, homo sapiens
  tDNA65_ProAGG_1_-_167684725_167684796@1.26.26,trn
ggctcgttggtctaggggtatgattc

SEQ ID NO: 3669 - DNA, 27 bp, homo sapiens
  tDNA65_ProAGG_1_-_167684725_167684796@1.27.27,trn
ggctcgttggtctaggggtatgattct

SEQ ID NO: 3670 - DNA, 28 bp, homo sapiens
  tDNA65_ProAGG_1_-_167684725_167684796@1.28.28,trn
ggctcgttggtctaggggtatgattctc

SEQ ID NO: 3671 - DNA, 29 bp, homo sapiens
  tDNA65_ProAGG_1_-_167684725_167684796@1.29.29,trn
ggctcgttggtctaggggtatgattctcg

SEQ ID NO: 3672 - DNA, 30 bp, homo sapiens
  tDNA65_ProAGG_1_-_167684725_167684796@1.30.30,trn
ggctcgttggtctaggggtatgattctcgc

SEQ ID NO: 3673 - DNA, 30 bp, homo sapiens
  tDNA12_ProTGG_11_-_75946869_75946940@1.30.30
ggctcgttggtctaggggtatgattctcgg

SEQ ID NO: 3674 - DNA, 18 bp, homo sapiens
  tDNA3_ProTGG_14_+_21101165_21101236@1.18.18
ggctcgttggtctagtgg

SEQ ID NO: 3675 - DNA, 25 bp, homo sapiens
  tDNA3_ProTGG_14_+_21101165_21101236@1.25.25
ggctcgttggtctagtggtatgatt

SEQ ID NO: 3676 - DNA, 18 bp, homo sapiens
  tDNA4_ArgTCT_17_+_8024243_8024330@1.18.18,tDNA52_
ggctctgtggcgcaatgg

SEQ ID NO: 3677 - DNA, 19 bp, homo sapiens
  tDNA4_ArgTCT_17_+_8024243_8024330@1.19.19,tDNA52_
ggctctgtggcgcaatgga

SEQ ID NO: 3678 - DNA, 23 bp, homo sapiens
  tDNA4_ArgTCT_17_+_8024243_8024330@1.23.23,tDNA52_
ggctctgtggcgcaatggatagc

SEQ ID NO: 3679 - DNA, 20 bp, homo sapiens
  tDNA121_ThrCGT_6_-_28615984_28616057@1.20.20
ggctctgtggcttagttggc

SEQ ID NO: 3680 - DNA, 23 bp, homo sapiens
  tDNAMT_TyrGTA_MT_-_5826_5891@9.31.23
ggctgagtgaagcattggactgt

SEQ ID NO: 3681 - DNA, 24 bp, homo sapiens
  tDNAMT_TyrGTA_MT_-_5826_5891@9.32.24
ggctgagtgaagcattggactgta

SEQ ID NO: 3682 - DNA, 25 bp, homo sapiens
  tDNAMT_TyrGTA_MT_-_5826_5891@9.33.25
ggctgagtgaagcattggactgtaa

SEQ ID NO: 3683 - DNA, 26 bp, homo sapiens
  tDNAMT_TyrGTA_MT_-_5826_5891@9.34.26
ggctgagtgaagcattggactgtaaa

SEQ ID NO: 3684 - DNA, 25 bp, homo sapiens
  tDNAMT_HisGTG_MT_+_12138_12206@48.72.25
ggcttacgaccccttatttacccca

SEQ ID NO: 3685 - DNA, 30 bp, homo sapiens
  tDNA144_AspGTC_6_-_27551236_27551307@41.70.30,trn
gggagaccggggttcgattccccgacgggg

SEQ ID NO: 3686 - DNA, 17 bp, homo sapiens
  tDNA120_AlaAGC_6_-_28626014_28626085@2.18.17,tDNA
gggatgtagctcagtgg

SEQ ID NO: 3687 - DNA, 18 bp, homo sapiens
  tDNA120_AlaAGC_6_-_28626014_28626085@2.19.18,tDNA
gggatgtagctcagtggt

SEQ ID NO: 3688 - DNA, 19 bp, homo sapiens
  tDNA120_AlaAGC_6_-_28626014_28626085@2.20.19,tDNA
gggatgtagctcagtggta

SEQ ID NO: 3689 - DNA, 20 bp, homo sapiens
  tDNA120_AlaAGC_6_-_28626014_28626085@2.21.20,tDNA
gggatgtagctcagtggtag

SEQ ID NO: 3690 - DNA, 21 bp, homo sapiens
  tDNA120_AlaAGC_6_-_28626014_28626085@2.22.21,tDNA
gggatgtagctcagtggtaga

SEQ ID NO: 3691 - DNA, 22 bp, homo sapiens
  tDNA120_AlaAGC_6_-_28626014_28626085@2.23.22,tDNA
gggatgtagctcagtggtagag

SEQ ID NO: 3692 - DNA, 23 bp, homo sapiens
  tDNA120_AlaAGC_6_-_28626014_28626085@2.24.23,tDNA
gggatgtagctcagtggtagagc

SEQ ID NO: 3693 - DNA, 18 bp, homo sapiens
  tDNA11_ArgACG_3_-_45730491_45730563@1.18.18,tDNA1
gggccagtggcgcaatgg

SEQ ID NO: 3694 - DNA, 19 bp, homo sapiens
  tDNA11_ArgACG_3_-_45730491_45730563@1.19.19,tDNA1
gggccagtggcgcaatgga

SEQ ID NO: 3695 - DNA, 20 bp, homo sapiens
  tDNA11_ArgACG_3_-_45730491_45730563@1.20.20,tDNA1
gggccagtggcgcaatggat

SEQ ID NO: 3696 - DNA, 21 bp, homo sapiens
  tDNA11_ArgACG_3_-_45730491_45730563@1.21.21,tDNA1
gggccagtggcgcaatggata

SEQ ID NO: 3697 - DNA, 23 bp, homo sapiens
  tDNA11_ArgACG_3_-_45730491_45730563@1.23.23,tDNA1
gggccagtggcgcaatggataac

SEQ ID NO: 3698 - DNA, 24 bp, homo sapiens
  tDNA11_ArgACG_3_-_45730491_45730563@1.24.24,tDNA1
gggccagtggcgcaatggataacg

SEQ ID NO: 3699 - DNA, 25 bp, homo sapiens
  tDNA11_ArgACG_3_-_45730491_45730563@1.25.25,tDNA1
gggccagtggcgcaatggataacgc

SEQ ID NO: 3700 - DNA, 19 bp, homo sapiens
  tDNA4_LeuAAG_2_+_30277568_30277640@1.19.19
gggccagtggctcaatgga

SEQ ID NO: 3701 - DNA, 26 bp, homo sapiens
  tDNAMT_PheGAA_MT_+_577_647@49.74.26
gggctcacatcaccccataaacacca

SEQ ID NO: 3702 - DNA, 16 bp, homo sapiens
  tDNA166_AlaAGC_6_-_26572092_26572164@1.16.16
ggggaattagctcaaa

SEQ ID NO: 3703 - DNA, 19 bp, homo sapiens
  tDNA166_AlaAGC_6_-_26572092_26572164@1.19.19
ggggaattagctcaaatgg

SEQ ID NO: 3704 - DNA, 20 bp, homo sapiens
  tDNA166_AlaAGC_6_-_26572092_26572164@1.20.20
ggggaattagctcaaatggt

SEQ ID NO: 3705 - DNA, 21 bp, homo sapiens
  tDNA166_AlaAGC_6_-_26572092_26572164@1.21.21
ggggaattagctcaaatggta

SEQ ID NO: 3706 - DNA, 22 bp, homo sapiens
  tDNA166_AlaAGC_6_-_26572092_26572164@1.22.22
ggggaattagctcaaatggtag

SEQ ID NO: 3707 - DNA, 23 bp, homo sapiens
  tDNA166_AlaAGC_6_-_26572092_26572164@1.23.23
ggggaattagctcaaatggtaga

SEQ ID NO: 3708 - DNA, 24 bp, homo sapiens
  tDNA166_AlaAGC_6_-_26572092_26572164@1.24.24
ggggaattagctcaaatggtagag

SEQ ID NO: 3709 - DNA, 25 bp, homo sapiens
  tDNA166_AlaAGC_6_-_26572092_26572164@1.25.25
ggggaattagctcaaatggtagagc

SEQ ID NO: 3710 - DNA, 16 bp, homo sapiens
  tDNA120_AlaAGC_6_-_28626014_28626085@1.16.16,tDNA
ggggatgtagctcagt

SEQ ID NO: 3711 - DNA, 17 bp, homo sapiens
  tDNA120_AlaAGC_6_-_28626014_28626085@1.17.17,tDNA
ggggatgtagctcagtg

SEQ ID NO: 3712 - DNA, 18 bp, homo sapiens
  tDNA120_AlaAGC_6_-_28626014_28626085@1.18.18,tDNA
ggggatgtagctcagtgg

SEQ ID NO: 3713 - DNA, 19 bp, homo sapiens
  tDNA120_AlaAGC_6_-_28626014_28626085@1.19.19,tDNA
ggggatgtagctcagtggt

SEQ ID NO: 3714 - DNA, 20 bp, homo sapiens
  tDNA120_AlaAGC_6_-_28626014_28626085@1.20.20,tDNA
ggggatgtagctcagtggta

SEQ ID NO: 3715 - DNA, 21 bp, homo sapiens
  tDNA120_AlaAGC_6_-_28626014_28626085@1.21.21,tDNA
ggggatgtagctcagtggtag

SEQ ID NO: 3716 - DNA, 22 bp, homo sapiens
  tDNA120_AlaAGC_6_-_28626014_28626085@1.22.22,tDNA
ggggatgtagctcagtggtaga

SEQ ID NO: 3717 - DNA, 23 bp, homo sapiens
  tDNA120_AlaAGC_6_-_28626014_28626085@1.23.23,tDNA
ggggatgtagctcagtggtagag

SEQ ID NO: 3718 - DNA, 24 bp, homo sapiens
  tDNA120_AlaAGC_6_-_28626014_28626085@1.24.24,tDNA
ggggatgtagctcagtggtagagc

SEQ ID NO: 3719 - DNA, 30 bp, homo sapiens
  tDNA120_AlaAGC_6_-_28626014_28626085@1.30.30,tDNA
ggggatgtagctcagtggtagagcgcatgc

SEQ ID NO: 3720 - DNA, 16 bp, homo sapiens
  tDNA3_AlaAGC_2_+_27274082_27274154@1.16.16,tDNA6_
gggggattagctcaaa

SEQ ID NO: 3721 - DNA, 19 bp, homo sapiens
  tDNA3_AlaAGC_2_+_27274082_27274154@1.19.19,tDNA6_
gggggattagctcaaatgg

SEQ ID NO: 3722 - DNA, 20 bp, homo sapiens
  tDNA3_AlaAGC_2_+_27274082_27274154@1.20.20,tDNA6_
gggggattagctcaaatggt

SEQ ID NO: 3723 - DNA, 21 bp, homo sapiens
  tDNA3_AlaAGC_2_+_27274082_27274154@1.21.21,tDNA6_
gggggattagctcaaatggta

SEQ ID NO: 3724 - DNA, 22 bp, homo sapiens
  tDNA3_AlaAGC_2_+_27274082_27274154@1.22.22,tDNA6_
gggggattagctcaaatggtag

SEQ ID NO: 3725 - DNA, 23 bp, homo sapiens
  tDNA3_AlaAGC_2_+_27274082_27274154@1.23.23,tDNA6_
gggggattagctcaaatggtaga

SEQ ID NO: 3726 - DNA, 24 bp, homo sapiens
  tDNA3_AlaAGC_2_+_27274082_27274154@1.24.24,tDNA6_
gggggattagctcaaatggtagag

SEQ ID NO: 3727 - DNA, 25 bp, homo sapiens
  tDNA3_AlaAGC_2_+_27274082_27274154@1.25.25,tDNA6_
gggggattagctcaaatggtagagc

SEQ ID NO: 3728 - DNA, 30 bp, homo sapiens
  tDNA3_AlaAGC_2_+_27274082_27274154@1.30.30,tDNA6_
gggggattagctcaaatggtagagcgctcg

SEQ ID NO: 3729 - DNA, 29 bp, homo sapiens
  tDNA5_CysGCA_7_+_149007281_149007352@1.29.29
gggggcatagctcagtggtagagcatttg

SEQ ID NO: 3730 - DNA, 22 bp, homo sapiens
  tDNA18_CysGCA_7_-_149310156_149310227@1.22.22,trn
gggggtatagctcaggggtaga

SEQ ID NO: 3731 - DNA, 23 bp, homo sapiens
  tDNA18_CysGCA_7_-_149310156_149310227@1.23.23,trn
gggggtatagctcaggggtagag

SEQ ID NO: 3732 - DNA, 29 bp, homo sapiens
  tDNA18_CysGCA_7_-_149310156_149310227@1.29.29,trn
gggggtatagctcaggggtagagcatttg

SEQ ID NO: 3733 - DNA, 18 bp, homo sapiens
  tDNA108_AlaAGC_6_-_28763741_28763812@1.18.18,tDNA
gggggtatagctcagtgg

SEQ ID NO: 3734 - DNA, 19 bp, homo sapiens
  tDNA3_CysGCA_15_+_80036997_80037069@1.19.19
gggggtatagctcagtggg

SEQ ID NO: 3735 - DNA, 30 bp, homo sapiens
  tDNA3_CysGCA_15_+_80036997_80037069@1.30.30
gggggtatagctcagtgggtagagcatttg

SEQ ID NO: 3736 - DNA, 19 bp, homo sapiens
  tDNA108_AlaAGC_6_-_28763741_28763812@1.19.19,tDNA
gggggtatagctcagtggt

SEQ ID NO: 3737 - DNA, 20 bp, homo sapiens
  tDNA108_AlaAGC_6_-_28763741_28763812@1.20.20,tDNA
gggggtatagctcagtggta

SEQ ID NO: 3738 - DNA, 21 bp, homo sapiens
  tDNA108_AlaAGC_6_-_28763741_28763812@1.21.21,tDNA
gggggtatagctcagtggtag

SEQ ID NO: 3739 - DNA, 22 bp, homo sapiens
  tDNA108_AlaAGC_6_-_28763741_28763812@1.22.22,tDNA
gggggtatagctcagtggtaga

SEQ ID NO: 3740 - DNA, 23 bp, homo sapiens
  tDNA108_AlaAGC_6_-_28763741_28763812@1.23.23,tDNA
gggggtatagctcagtggtagag

SEQ ID NO: 3741 - DNA, 24 bp, homo sapiens
  tDNA108_AlaAGC_6_-_28763741_28763812@1.24.24,tDNA
gggggtatagctcagtggtagagc

SEQ ID NO: 3742 - DNA, 25 bp, homo sapiens
  tDNA28_CysGCA_17_-_37025545_37025616@1.25.25,tDNA
gggggtatagctcagtggtagagca

SEQ ID NO: 3743 - DNA, 27 bp, homo sapiens
  tDNA28_CysGCA_17_-_37025545_37025616@1.27.27,tDNA
gggggtatagctcagtggtagagcatt

SEQ ID NO: 3744 - DNA, 29 bp, homo sapiens
  tDNA28_CysGCA_17_-_37025545_37025616@1.29.29,tDNA
gggggtatagctcagtggtagagcatttg

SEQ ID NO: 3745 - DNA, 16 bp, homo sapiens
  tDNA68_AlaAGC_6_+_28687481_28687552@1.16.16,tDNA6
gggggtgtagctcagt

SEQ ID NO: 3746 - DNA, 17 bp, homo sapiens
  tDNA68_AlaAGC_6_+_28687481_28687552@1.17.17,tDNA6
gggggtgtagctcagtg

SEQ ID NO: 3747 - DNA, 18 bp, homo sapiens
  tDNA68_AlaAGC_6_+_28687481_28687552@1.18.18,tDNA6
gggggtgtagctcagtgg

SEQ ID NO: 3748 - DNA, 19 bp, homo sapiens
  tDNA68_AlaAGC_6_+_28687481_28687552@1.19.19,tDNA6
gggggtgtagctcagtggt

SEQ ID NO: 3749 - DNA, 20 bp, homo sapiens
  tDNA68_AlaAGC_6_+_28687481_28687552@1.20.20,tDNA6
gggggtgtagctcagtggta

SEQ ID NO: 3750 - DNA, 21 bp, homo sapiens
  tDNA68_AlaAGC_6_+_28687481_28687552@1.21.21,tDNA6
gggggtgtagctcagtggtag

SEQ ID NO: 3751 - DNA, 22 bp, homo sapiens
  tDNA68_AlaAGC_6_+_28687481_28687552@1.22.22,tDNA6
gggggtgtagctcagtggtaga

SEQ ID NO: 3752 - DNA, 23 bp, homo sapiens
  tDNA68_AlaAGC_6_+_28687481_28687552@1.23.23,tDNA6
gggggtgtagctcagtggtagag

SEQ ID NO: 3753 - DNA, 24 bp, homo sapiens
  tDNA68_AlaAGC_6_+_28687481_28687552@1.24.24,tDNA6
gggggtgtagctcagtggtagagc

SEQ ID NO: 3754 - DNA, 29 bp, homo sapiens
  tDNA7_CysGCA_3_-_131947944_131948015@1.29.29
gggggtgtagctcagtggtagagcatttg

SEQ ID NO: 3755 - DNA, 30 bp, homo sapiens
  tDNA68_AlaAGC_6_+_28687481_28687552@1.30.30,tDNA6
gggggtgtagctcagtggtagagcgcgtgc

SEQ ID NO: 3756 - DNA, 20 bp, homo sapiens
  tDNA18_CysGCA_7_-_149310156_149310227@2.21.20,trn
ggggtatagctcaggggtag

SEQ ID NO: 3757 - DNA, 21 bp, homo sapiens
  tDNA18_CysGCA_7_-_149310156_149310227@2.22.21,trn
ggggtatagctcaggggtaga

SEQ ID NO: 3758 - DNA, 22 bp, homo sapiens
  tDNA18_CysGCA_7_-_149310156_149310227@2.23.22,trn
ggggtatagctcaggggtagag

SEQ ID NO: 3759 - DNA, 16 bp, homo sapiens
  tDNA12_ProTGG_11_-_75946869_75946940@15.30.16
ggggtatgattctcgg

SEQ ID NO: 3760 - DNA, 23 bp, homo sapiens
  tDNA68_AlaAGC_6_+_28687481_28687552@2.24.23,tDNA6
ggggtgtagctcagtggtagagc

SEQ ID NO: 3761 - DNA, 29 bp, homo sapiens
  tDNA68_AlaAGC_6_+_28687481_28687552@2.30.29,tDNA6
ggggtgtagctcagtggtagagcgcgtgc

SEQ ID NO: 3762 - DNA, 21 bp, homo sapiens
  tDNAMT_TyrGTA_MT_-_5826_5891@45.65.21
ggggttaggcctctttttacc

SEQ ID NO: 3763 - DNA, 23 bp, homo sapiens
  tDNAMT_TyrGTA_MT_-_5826_5891@45.67.23
ggggttaggcctctttttaccac

SEQ ID NO: 3764 - DNA, 24 bp, homo sapiens
  tDNAMT_TyrGTA_MT_-_5826_5891@45.68.24
ggggttaggcctctttttaccacc

SEQ ID NO: 3765 - DNA, 25 bp, homo sapiens
  tDNAMT_TyrGTA_MT_-_5826_5891@45.69.25
ggggttaggcctctttttaccacca

SEQ ID NO: 3766 - DNA, 21 bp, homo sapiens
  tDNAMT_AlaTGC_MT_-_5587_5655@52.72.21,tDNAlookali
ggggttttgcagtccttacca

SEQ ID NO: 3767 - DNA, 21 bp, homo sapiens
  tDNA18_CysGCA_7_-_149310156_149310227@3.23.21,trn
gggtatagctcaggggtagag

SEQ ID NO: 3768 - DNA, 20 bp, homo sapiens
  tDNA65_ProAGG_1_-_167684725_167684796@34.53.20,tr
gggtgcgagaggtcccgggt

SEQ ID NO: 3769 - DNA, 23 bp, homo sapiens
  tDNAMT_ProTGG_MT_-_15956_16023@33.55.23
gggtgctaatggtggagttaaag

SEQ ID NO: 3770 - DNA, 28 bp, homo sapiens
  tDNA68_AlaAGC_6_+_28687481_28687552@3.30.28,tDNA6
gggtgtagctcagtggtagagcgcgtgc

SEQ ID NO: 3771 - DNA, 23 bp, homo sapiens
  tDNAMT_TyrGTA_MT_-_5826_5891@46.68.23
gggttaggcctctttttaccacc

SEQ ID NO: 3772 - DNA, 24 bp, homo sapiens
  tDNAMT_TyrGTA_MT_-_5826_5891@46.69.24
gggttaggcctctttttaccacca

SEQ ID NO: 3773 - DNA, 26 bp, homo sapiens
  tDNA175_SerGCT_6_-_26305718_26305801@62.87.26,trn
gggttcgaatcccatcctcgtcgcca

SEQ ID NO: 3774 - DNA, 26 bp, homo sapiens
  tDNA5_GluTTC_13_-_41634874_41634945@50.75.26,tDNA
gggttcgactcccggtatgggaacca

SEQ ID NO: 3775 - DNA, 26 bp, homo sapiens
  tDNA3_GluTTC_13_-_45492062_45492133@50.75.26,tDNA
gggttcgactcccggtgtgggaacca

SEQ ID NO: 3776 - DNA, 26 bp, homo sapiens
  tDNA1_ArgCCG_16_+_3200675_3200747@51.76.26,tDNA11
gggttcgagtcccttcgtggtcgcca

SEQ ID NO: 3777 - DNA, 26 bp, homo sapiens
  tDNA120_AlaAGC_6_-_28626014_28626085@50.75.26
gggttcgatccccagcatctccacca

SEQ ID NO: 3778 - DNA, 26 bp, homo sapiens
  tDNA119_AlaCGC_6_-_28641613_28641684@50.75.26,trn
gggttcgatccccggcatctccacca

SEQ ID NO: 3779 - DNA, 26 bp, homo sapiens
  tDNA144_AspGTC_6_-_27551236_27551307@50.75.26,trn
gggttcgattccccgacggggagcca

SEQ ID NO: 3780 - DNA, 26 bp, homo sapiens
  tDNA92_PheGAA_1_-_149672905_149672976@50.75.26,tr
gggttcgattcccggtcagggaacca

SEQ ID NO: 3781 - DNA, 26 bp, homo sapiens
  tDNAMT_SerTGA_MT_-_7446_7514@47.72.26,tDNAlookali
gggttcgattccttccttttttgcca

SEQ ID NO: 3782 - DNA, 20 bp, homo sapiens
  tDNAMT_AlaTGC_MT_-_5587_5655@53.72.20,tDNAlookali
gggttttgcagtccttacca

SEQ ID NO: 3783 - DNA, 19 bp, homo sapiens
  tDNAMT_TyrGTA_MT_-_5826_5891@1.19.19
ggtaaaatggctgagtgaa

SEQ ID NO: 3784 - DNA, 20 bp, homo sapiens
  tDNAMT_TyrGTA_MT_-_5826_5891@1.20.20
ggtaaaatggctgagtgaag

SEQ ID NO: 3785 - DNA, 21 bp, homo sapiens
  tDNAMT_TyrGTA_MT_-_5826_5891@1.21.21
ggtaaaatggctgagtgaagc

SEQ ID NO: 3786 - DNA, 22 bp, homo sapiens
  tDNAMT_TyrGTA_MT_-_5826_5891@1.22.22
ggtaaaatggctgagtgaagca

SEQ ID NO: 3787 - DNA, 24 bp, homo sapiens
  tDNAMT_TyrGTA_MT_-_5826_5891@1.24.24
ggtaaaatggctgagtgaagcatt

SEQ ID NO: 3788 - DNA, 26 bp, homo sapiens
  tDNAMT_TyrGTA_MT_-_5826_5891@1.26.26
ggtaaaatggctgagtgaagcattgg

SEQ ID NO: 3789 - DNA, 27 bp, homo sapiens
  tDNAMT_TyrGTA_MT_-_5826_5891@1.27.27
ggtaaaatggctgagtgaagcattgga

SEQ ID NO: 3790 - DNA, 28 bp, homo sapiens
  tDNAMT_TyrGTA_MT_-_5826_5891@1.28.28
ggtaaaatggctgagtgaagcattggac

SEQ ID NO: 3791 - DNA, 29 bp, homo sapiens
  tDNAMT_TyrGTA_MT_-_5826_5891@1.29.29
ggtaaaatggctgagtgaagcattggact

SEQ ID NO: 3792 - DNA, 30 bp, homo sapiens
  tDNAMT_TyrGTA_MT_-_5826_5891@1.30.30
ggtaaaatggctgagtgaagcattggactg

SEQ ID NO: 3793 - DNA, 18 bp, homo sapiens
  tDNA22_GlnCTG_1_+_147800937_147801008@17.34.18,tr
ggtaagcactctggactc

SEQ ID NO: 3794 - DNA, 24 bp, homo sapiens
  tDNAMT_LeuTAA_MT_+_3230_3304@19.42.24
ggtaatcgcataaaacttaaaact

SEQ ID NO: 3795 - DNA, 18 bp, homo sapiens
  tDNA18_GlyGCC_16_+_70822597_70822667@17.34.18,trn
ggtagaattctcgcctgc

SEQ ID NO: 3796 - DNA, 19 bp, homo sapiens
  tDNA18_GlyGCC_16_+_70822597_70822667@17.35.19,trn
ggtagaattctcgcctgcc

SEQ ID NO: 3797 - DNA, 20 bp, homo sapiens
  tDNA19_TyrGTA_14_-_21121258_21121351@18.37.20,trn
ggtagagcggaggactgtag

SEQ ID NO: 3798 - DNA, 16 bp, homo sapiens
  tDNA78_LeuAAG_6_+_28956779_28956860@1.16.16,tDNA1
ggtagcgtggccgagc

SEQ ID NO: 3799 - DNA, 17 bp, homo sapiens
  tDNA78_LeuAAG_6_+_28956779_28956860@1.17.17,tDNA1
ggtagcgtggccgagcg

SEQ ID NO: 3800 - DNA, 18 bp, homo sapiens
  tDNA78_LeuAAG_6_+_28956779_28956860@1.18.18,tDNA1
ggtagcgtggccgagcgg

SEQ ID NO: 3801 - DNA, 19 bp, homo sapiens
  tDNA78_LeuAAG_6_+_28956779_28956860@1.19.19,tDNA1
ggtagcgtggccgagcggt

SEQ ID NO: 3802 - DNA, 20 bp, homo sapiens
  tDNA78_LeuAAG_6_+_28956779_28956860@1.20.20,tDNA1
ggtagcgtggccgagcggtc

SEQ ID NO: 3803 - DNA, 21 bp, homo sapiens
  tDNA78_LeuAAG_6_+_28956779_28956860@1.21.21,tDNA1
ggtagcgtggccgagcggtct

SEQ ID NO: 3804 - DNA, 22 bp, homo sapiens
  tDNA78_LeuAAG_6_+_28956779_28956860@1.22.22,tDNA1
ggtagcgtggccgagcggtcta

SEQ ID NO: 3805 - DNA, 23 bp, homo sapiens
  tDNA78_LeuAAG_6_+_28956779_28956860@1.23.23,tDNA1
ggtagcgtggccgagcggtctaa

SEQ ID NO: 3806 - DNA, 24 bp, homo sapiens
  tDNA78_LeuAAG_6_+_28956779_28956860@1.24.24,tDNA1
ggtagcgtggccgagcggtctaag

SEQ ID NO: 3807 - DNA, 25 bp, homo sapiens
  tDNA78_LeuAAG_6_+_28956779_28956860@1.25.25,tDNA1
ggtagcgtggccgagcggtctaagg

SEQ ID NO: 3808 - DNA, 26 bp, homo sapiens
  tDNA78_LeuAAG_6_+_28956779_28956860@1.26.26,tDNA1
ggtagcgtggccgagcggtctaaggc

SEQ ID NO: 3809 - DNA, 29 bp, homo sapiens
  tDNA78_LeuAAG_6_+_28956779_28956860@1.29.29,tDNA1
ggtagcgtggccgagcggtctaaggcgct

SEQ ID NO: 3810 - DNA, 30 bp, homo sapiens
  tDNA78_LeuAAG_6_+_28956779_28956860@1.30.30,tDNA1
ggtagcgtggccgagcggtctaaggcgctg

SEQ ID NO: 3811 - DNA, 16 bp, homo sapiens
  tDNA126_LeuAAG_6_-_28446400_28446481@1.16.16,tDNA
ggtagcgtggccgagt

SEQ ID NO: 3812 - DNA, 18 bp, homo sapiens
  tDNA126_LeuAAG_6_-_28446400_28446481@1.18.18,tDNA
ggtagcgtggccgagtgg

SEQ ID NO: 3813 - DNA, 19 bp, homo sapiens
  tDNA126_LeuAAG_6_-_28446400_28446481@1.19.19,tDNA
ggtagcgtggccgagtggt

SEQ ID NO: 3814 - DNA, 20 bp, homo sapiens
  tDNA126_LeuAAG_6_-_28446400_28446481@1.20.20,tDNA
ggtagcgtggccgagtggtc

SEQ ID NO: 3815 - DNA, 21 bp, homo sapiens
  tDNA126_LeuAAG_6_-_28446400_28446481@1.21.21,tDNA
ggtagcgtggccgagtggtct

SEQ ID NO: 3816 - DNA, 22 bp, homo sapiens
  tDNA126_LeuAAG_6_-_28446400_28446481@1.22.22,tDNA
ggtagcgtggccgagtggtcta

SEQ ID NO: 3817 - DNA, 23 bp, homo sapiens
  tDNA126_LeuAAG_6_-_28446400_28446481@1.23.23,tDNA
ggtagcgtggccgagtggtctaa

SEQ ID NO: 3818 - DNA, 24 bp, homo sapiens
  tDNA126_LeuAAG_6_-_28446400_28446481@1.24.24,tDNA
ggtagcgtggccgagtggtctaag

SEQ ID NO: 3819 - DNA, 25 bp, homo sapiens
  tDNA27_LeuTAG_16_-_22207032_22207113@1.25.25
ggtagcgtggccgagtggtctaagg

SEQ ID NO: 3820 - DNA, 26 bp, homo sapiens
  tDNA27_LeuTAG_16_-_22207032_22207113@1.26.26
ggtagcgtggccgagtggtctaaggc

SEQ ID NO: 3821 - DNA, 18 bp, homo sapiens
  tDNA2_LeuTAG_14_+_21093529_21093610@1.18.18
ggtagtgtggccgagcgg

SEQ ID NO: 3822 - DNA, 21 bp, homo sapiens
  tDNA2_LeuTAG_14_+_21093529_21093610@1.21.21
ggtagtgtggccgagcggtct

SEQ ID NO: 3823 - DNA, 24 bp, homo sapiens
  tDNA2_LeuTAG_14_+_21093529_21093610@1.24.24
ggtagtgtggccgagcggtctaag

SEQ ID NO: 3824 - DNA, 25 bp, homo sapiens
  tDNA2_LeuTAG_14_+_21093529_21093610@1.25.25
ggtagtgtggccgagcggtctaagg

SEQ ID NO: 3825 - DNA, 26 bp, homo sapiens
  tDNA2_LeuTAG_14_+_21093529_21093610@1.26.26
ggtagtgtggccgagcggtctaaggc

SEQ ID NO: 3826 - DNA, 30 bp, homo sapiens
  tDNA2_LeuTAG_14_+_21093529_21093610@1.30.30
ggtagtgtggccgagcggtctaaggcgctg

SEQ ID NO: 3827 - DNA, 19 bp, homo sapiens
  tDNA12_ProTGG_11_-_75946869_75946940@17.35.19
ggtatgattctcggtttgg

SEQ ID NO: 3828 - DNA, 18 bp, homo sapiens
  tDNA84_GlnTTG_6_+_145503859_145503930@1.18.18,trn
ggtcccatggtgtaatgg

SEQ ID NO: 3829 - DNA, 19 bp, homo sapiens
  tDNA84_GlnTTG_6_+_145503859_145503930@1.19.19,trn
ggtcccatggtgtaatggt

SEQ ID NO: 3830 - DNA, 22 bp, homo sapiens
  tDNA84_GlnTTG_6_+_145503859_145503930@1.22.22,trn
ggtcccatggtgtaatggttag

SEQ ID NO: 3831 - DNA, 23 bp, homo sapiens
  tDNA84_GlnTTG_6_+_145503859_145503930@1.23.23,trn
ggtcccatggtgtaatggttagc

SEQ ID NO: 3832 - DNA, 24 bp, homo sapiens
  tDNA84_GlnTTG_6_+_145503859_145503930@1.24.24,trn
ggtcccatggtgtaatggttagca

SEQ ID NO: 3833 - DNA, 29 bp, homo sapiens
  tDNA84_GlnTTG_6_+_145503859_145503930@1.29.29,trn
ggtcccatggtgtaatggttagcactctg

SEQ ID NO: 3834 - DNA, 30 bp, homo sapiens
  tDNA84_GlnTTG_6_+_145503859_145503930@1.30.30,trn
ggtcccatggtgtaatggttagcactctgg

SEQ ID NO: 3835 - DNA, 24 bp, homo sapiens
  tDNA44_AspGTC_1_+_161492935_161493006@52.75.24
ggtcgattccccgacggggagcca

SEQ ID NO: 3836 - DNA, 16 bp, homo sapiens
  tDNAMT_GluTTC_MT_-_14674_14742@42.57.16,tDNAlooka
ggtcgtggttgtagtc

SEQ ID NO: 3837 - DNA, 17 bp, homo sapiens
  tDNAMT_GluTTC_MT_-_14674_14742@42.58.17,tDNAlooka
ggtcgtggttgtagtcc

SEQ ID NO: 3838 - DNA, 18 bp, homo sapiens
  tDNAMT_GluTTC_MT_-_14674_14742@42.59.18,tDNAlooka
ggtcgtggttgtagtccg

SEQ ID NO: 3839 - DNA, 19 bp, homo sapiens
  tDNAMT_GluTTC_MT_-_14674_14742@42.60.19,tDNAlooka
ggtcgtggttgtagtccgt

SEQ ID NO: 3840 - DNA, 20 bp, homo sapiens
  tDNAMT_GluTTC_MT_-_14674_14742@42.61.20,tDNAlooka
ggtcgtggttgtagtccgtg

SEQ ID NO: 3841 - DNA, 21 bp, homo sapiens
  tDNAMT_GluTTC_MT_-_14674_14742@42.62.21,tDNAlooka
ggtcgtggttgtagtccgtgc

SEQ ID NO: 3842 - DNA, 22 bp, homo sapiens
  tDNAMT_GluTTC_MT_-_14674_14742@42.63.22,tDNAlooka
ggtcgtggttgtagtccgtgcg

SEQ ID NO: 3843 - DNA, 23 bp, homo sapiens
  tDNAMT_GluTTC_MT_-_14674_14742@42.64.23,tDNAlooka
ggtcgtggttgtagtccgtgcga

SEQ ID NO: 3844 - DNA, 24 bp, homo sapiens
  tDNAMT_GluTTC_MT_-_14674_14742@42.65.24,tDNAlooka
ggtcgtggttgtagtccgtgcgag

SEQ ID NO: 3845 - DNA, 25 bp, homo sapiens
  tDNAMT_GluTTC_MT_-_14674_14742@42.66.25,tDNAlooka
ggtcgtggttgtagtccgtgcgaga

SEQ ID NO: 3846 - DNA, 26 bp, homo sapiens
  tDNAMT_GluTTC_MT_-_14674_14742@42.67.26,tDNAlooka
ggtcgtggttgtagtccgtgcgagaa

SEQ ID NO: 3847 - DNA, 28 bp, homo sapiens
  tDNAMT_GluTTC_MT_-_14674_14742@42.69.28,tDNAlooka
ggtcgtggttgtagtccgtgcgagaata

SEQ ID NO: 3848 - DNA, 29 bp, homo sapiens
  tDNAMT_GluTTC_MT_-_14674_14742@42.70.29,tDNAlooka
ggtcgtggttgtagtccgtgcgagaatac

SEQ ID NO: 3849 - DNA, 30 bp, homo sapiens
  tDNAMT_GluTTC_MT_-_14674_14742@42.71.30,tDNAlooka
ggtcgtggttgtagtccgtgcgagaatacc

SEQ ID NO: 3850 - DNA, 16 bp, homo sapiens
  tDNA78_LeuAAG_6_+_28956779_28956860@17.32.16,tDNA
ggtctaaggcgctgga

SEQ ID NO: 3851 - DNA, 22 bp, homo sapiens
  tDNA3_GluTTC_13_-_45492062_45492133@9.30.22,tDNA1
ggtctagcggttaggattcctg

SEQ ID NO: 3852 - DNA, 23 bp, homo sapiens
  tDNA3_GluTTC_13_-_45492062_45492133@9.31.23,tDNA1
ggtctagcggttaggattcctgg

SEQ ID NO: 3853 - DNA, 22 bp, homo sapiens
  tDNA65_ProAGG_1_-_167684725_167684796@9.30.22,trn
ggtctaggggtatgattctcgc

SEQ ID NO: 3854 - DNA, 22 bp, homo sapiens
  tDNA12_ProTGG_11_-_75946869_75946940@9.30.22
ggtctaggggtatgattctcgg

SEQ ID NO: 3855 - DNA, 21 bp, homo sapiens
  tDNA25_GluCTC_2_-_71273488_71273560@9.29.21,tDNA5
ggtctagtggttaggattcgg

SEQ ID NO: 3856 - DNA, 24 bp, homo sapiens
  tDNA25_GluCTC_2_-_71273488_71273560@9.32.24,tDNA5
ggtctagtggttaggattcggcgc

SEQ ID NO: 3857 - DNA, 25 bp, homo sapiens
  tDNA25_GluCTC_2_-_71273488_71273560@9.33.25,tDNA5
ggtctagtggttaggattcggcgct

SEQ ID NO: 3858 - DNA, 17 bp, homo sapiens
  tDNA15_GlnCTG_1_+_145963304_145963375@17.33.17,tr
ggtgagcactctggact

SEQ ID NO: 3859 - DNA, 18 bp, homo sapiens
  tDNA15_GlnCTG_1_+_145963304_145963375@17.34.18,tr
ggtgagcactctggactc

SEQ ID NO: 3860 - DNA, 19 bp, homo sapiens
  tDNA65_ProAGG_1_-_167684725_167684796@35.53.19,tr
ggtgcgagaggtcccgggt

SEQ ID NO: 3861 - DNA, 20 bp, homo sapiens
  tDNAMT_ProTGG_MT_-_15956_16023@34.53.20
ggtgctaatggtggagttaa

SEQ ID NO: 3862 - DNA, 22 bp, homo sapiens
  tDNAMT_ProTGG_MT_-_15956_16023@34.55.22
ggtgctaatggtggagttaaag

SEQ ID NO: 3863 - DNA, 24 bp, homo sapiens
  tDNAMT_ProTGG_MT_-_15956_16023@34.57.24
ggtgctaatggtggagttaaagac

SEQ ID NO: 3864 - DNA, 26 bp, homo sapiens
  tDNAMT_ProTGG_MT_-_15956_16023@43.68.26
ggtggagttaaagactttttctctga

SEQ ID NO: 3865 - DNA, 27 bp, homo sapiens
  tDNAMT_ProTGG_MT_-_15956_16023@43.69.27
ggtggagttaaagactttttctctgac

SEQ ID NO: 3866 - DNA, 28 bp, homo sapiens
  tDNAMT_ProTGG_MT_-_15956_16023@43.70.28
ggtggagttaaagactttttctctgacc

SEQ ID NO: 3867 - DNA, 25 bp, homo sapiens
  tDNA117_GlyTCC_1_-_145397864_145397935@6.30.25,tr
ggtggtatagtggtgagcatagctg

SEQ ID NO: 3868 - DNA, 25 bp, homo sapiens
  tDNA59_GluCTC_1_+_249168447_249168518@6.30.25,trn
ggtggtctagtggttaggattcggc

SEQ ID NO: 3869 - DNA, 27 bp, homo sapiens
  tDNA59_GluCTC_1_+_249168447_249168518@6.32.27,trn
ggtggtctagtggttaggattcggcgc

SEQ ID NO: 3870 - DNA, 18 bp, homo sapiens
  tDNA91_GlyCCC_1_-_149680210_149680280@6.23.18,trn
ggtggttcagtggtagaa

SEQ ID NO: 3871 - DNA, 19 bp, homo sapiens
  tDNA91_GlyCCC_1_-_149680210_149680280@6.24.19,trn
ggtggttcagtggtagaat

SEQ ID NO: 3872 - DNA, 24 bp, homo sapiens
  tDNA91_GlyCCC_1_-_149680210_149680280@6.29.24,trn
ggtggttcagtggtagaattctcg

SEQ ID NO: 3873 - DNA, 25 bp, homo sapiens
  tDNA91_GlyCCC_1_-_149680210_149680280@6.30.25,trn
ggtggttcagtggtagaattctcgc

SEQ ID NO: 3874 - DNA, 22 bp, homo sapiens
  tDNA15_GlnCTG_1_+_145963304_145963375@9.30.22,trn
ggtgtaatggtgagcactctgg

SEQ ID NO: 3875 - DNA, 25 bp, homo sapiens
  tDNA15_GlnCTG_1_+_145963304_145963375@9.33.25,trn
ggtgtaatggtgagcactctggact

SEQ ID NO: 3876 - DNA, 26 bp, homo sapiens
  tDNA15_GlnCTG_1_+_145963304_145963375@9.34.26,trn
ggtgtaatggtgagcactctggactc

SEQ ID NO: 3877 - DNA, 22 bp, homo sapiens
  tDNA42_GlnCTG_6_+_27263212_27263283@9.30.22,tDNA1
ggtgtaatggttagcactctgg

SEQ ID NO: 3878 - DNA, 23 bp, homo sapiens
  tDNA42_GlnCTG_6_+_27263212_27263283@9.31.23,tDNA1
ggtgtaatggttagcactctgga

SEQ ID NO: 3879 - DNA, 24 bp, homo sapiens
  tDNA42_GlnCTG_6_+_27263212_27263283@9.32.24,tDNA1
ggtgtaatggttagcactctggac

SEQ ID NO: 3880 - DNA, 25 bp, homo sapiens
  tDNA42_GlnCTG_6_+_27263212_27263283@9.33.25,tDNA1
ggtgtaatggttagcactctggact

SEQ ID NO: 3881 - DNA, 26 bp, homo sapiens
  tDNA42_GlnCTG_6_+_27263212_27263283@9.34.26,tDNA1
ggtgtaatggttagcactctggactc

SEQ ID NO: 3882 - DNA, 29 bp, homo sapiens
  tDNA42_GlnCTG_6_+_27263212_27263283@9.37.29,tDNA1
ggtgtaatggttagcactctggactctga

SEQ ID NO: 3883 - DNA, 22 bp, homo sapiens
  tDNA34_GlyCCC_16_-_686736_686806@9.30.22,tDNA27_G
ggtgtagtggtatcatgcaaga

SEQ ID NO: 3884 - DNA, 16 bp, homo sapiens
  tDNA42_GlnCTG_6_+_27263212_27263283@17.32.16,tDNA
ggttagcactctggac

SEQ ID NO: 3885 - DNA, 17 bp, homo sapiens
  tDNA42_GlnCTG_6_+_27263212_27263283@17.33.17,tDNA
ggttagcactctggact

SEQ ID NO: 3886 - DNA, 18 bp, homo sapiens
  tDNA42_GlnCTG_6_+_27263212_27263283@17.34.18,tDNA
ggttagcactctggactc

SEQ ID NO: 3887 - DNA, 19 bp, homo sapiens
  tDNA42_GlnCTG_6_+_27263212_27263283@17.35.19,tDNA
ggttagcactctggactct

SEQ ID NO: 3888 - DNA, 20 bp, homo sapiens
  tDNA42_GlnCTG_6_+_27263212_27263283@17.36.20,tDNA
ggttagcactctggactctg

SEQ ID NO: 3889 - DNA, 21 bp, homo sapiens
  tDNA42_GlnCTG_6_+_27263212_27263283@17.37.21,tDNA
ggttagcactctggactctga

SEQ ID NO: 3890 - DNA, 22 bp, homo sapiens
  tDNA42_GlnCTG_6_+_27263212_27263283@17.38.22,tDNA
ggttagcactctggactctgaa

SEQ ID NO: 3891 - DNA, 23 bp, homo sapiens
  tDNA42_GlnCTG_6_+_27263212_27263283@17.39.23,tDNA
ggttagcactctggactctgaat

SEQ ID NO: 3892 - DNA, 24 bp, homo sapiens
  tDNA42_GlnCTG_6_+_27263212_27263283@17.40.24,tDNA
ggttagcactctggactctgaatc

SEQ ID NO: 3893 - DNA, 25 bp, homo sapiens
  tDNA42_GlnCTG_6_+_27263212_27263283@17.41.25,tDNA
ggttagcactctggactctgaatcc

SEQ ID NO: 3894 - DNA, 28 bp, homo sapiens
  tDNA146_GlnCTG_6_-_27515531_27515602@17.44.28,trn
ggttagcactctggactctgaatccagc

SEQ ID NO: 3895 - DNA, 29 bp, homo sapiens
  tDNA146_GlnCTG_6_-_27515531_27515602@17.45.29,trn
ggttagcactctggactctgaatccagcg

SEQ ID NO: 3896 - DNA, 20 bp, homo sapiens
  tDNA130_GlnTTG_6_-_27763640_27763711@17.36.20,trn
ggttagcactctggactttg

SEQ ID NO: 3897 - DNA, 21 bp, homo sapiens
  tDNA130_GlnTTG_6_-_27763640_27763711@17.37.21,trn
ggttagcactctggactttga

SEQ ID NO: 3898 - DNA, 22 bp, homo sapiens
  tDNA130_GlnTTG_6_-_27763640_27763711@17.38.22,trn
ggttagcactctggactttgaa

SEQ ID NO: 3899 - DNA, 23 bp, homo sapiens
  tDNA130_GlnTTG_6_-_27763640_27763711@17.39.23,trn
ggttagcactctggactttgaat

SEQ ID NO: 3900 - DNA, 24 bp, homo sapiens
  tDNA130_GlnTTG_6_-_27763640_27763711@17.40.24,trn
ggttagcactctggactttgaatc

SEQ ID NO: 3901 - DNA, 18 bp, homo sapiens
  tDNA25_GluCTC_2_-_71273488_71273560@17.34.18,tDNA
ggttaggattcggcgctc

SEQ ID NO: 3902 - DNA, 19 bp, homo sapiens
  tDNA25_GluCTC_2_-_71273488_71273560@17.35.19,tDNA
ggttaggattcggcgctct

SEQ ID NO: 3903 - DNA, 20 bp, homo sapiens
  tDNA25_GluCTC_2_-_71273488_71273560@17.36.20,tDNA
ggttaggattcggcgctctc

SEQ ID NO: 3904 - DNA, 21 bp, homo sapiens
  tDNA25_GluCTC_2_-_71273488_71273560@17.37.21,tDNA
ggttaggattcggcgctctca

SEQ ID NO: 3905 - DNA, 22 bp, homo sapiens
  tDNA10_GluCTC_3_-_103879524_103879595@17.38.22,tr
ggttaggattcggcgctctcac

SEQ ID NO: 3906 - DNA, 23 bp, homo sapiens
  tDNA10_GluCTC_3_-_103879524_103879595@17.39.23,tr
ggttaggattcggcgctctcacc

SEQ ID NO: 3907 - DNA, 25 bp, homo sapiens
  tDNA10_GluCTC_3_-_103879524_103879595@17.41.25,tr
ggttaggattcggcgctctcaccgc

SEQ ID NO: 3908 - DNA, 26 bp, homo sapiens
  tDNA10_GluCTC_3_-_103879524_103879595@17.42.26,tr
ggttaggattcggcgctctcaccgcc

SEQ ID NO: 3909 - DNA, 23 bp, homo sapiens
  tDNAMT_TyrGTA_MT_-_5826_5891@47.69.23
ggttaggcctctttttaccacca

SEQ ID NO: 3910 - DNA, 16 bp, homo sapiens
  tDNA111_HisGTG_1_-_147774845_147774916@17.32.16,t
ggttagtactctgcgt

SEQ ID NO: 3911 - DNA, 17 bp, homo sapiens
  tDNA111_HisGTG_1_-_147774845_147774916@17.33.17,t
ggttagtactctgcgtt

SEQ ID NO: 3912 - DNA, 18 bp, homo sapiens
  tDNA111_HisGTG_1_-_147774845_147774916@17.34.18,t
ggttagtactctgcgttg

SEQ ID NO: 3913 - DNA, 19 bp, homo sapiens
  tDNA111_HisGTG_1_-_147774845_147774916@17.35.19,t
ggttagtactctgcgttgt

SEQ ID NO: 3914 - DNA, 21 bp, homo sapiens
  tDNA111_HisGTG_1_-_147774845_147774916@17.37.21,t
ggttagtactctgcgttgtgg

SEQ ID NO: 3915 - DNA, 22 bp, homo sapiens
  tDNA111_HisGTG_1_-_147774845_147774916@17.38.22,t
ggttagtactctgcgttgtggc

SEQ ID NO: 3916 - DNA, 23 bp, homo sapiens
  tDNA111_HisGTG_1_-_147774845_147774916@17.39.23,t
ggttagtactctgcgttgtggcc

SEQ ID NO: 3917 - DNA, 24 bp, homo sapiens
  tDNA111_HisGTG_1_-_147774845_147774916@17.40.24,t
ggttagtactctgcgttgtggccg

SEQ ID NO: 3918 - DNA, 23 bp, homo sapiens
  tDNAMT_MetCAT_MT_+_4402_4469@48.70.23
ggttatacccttcccgtactacc

SEQ ID NO: 3919 - DNA, 24 bp, homo sapiens
  tDNAMT_MetCAT_MT_+_4402_4469@48.71.24
ggttatacccttcccgtactacca

SEQ ID NO: 3920 - DNA, 25 bp, homo sapiens
  tDNA65_AlaAGC_6_+_28574933_28575004@51.75.25,tDNA
ggttcaatccccggcacctccacca

SEQ ID NO: 3921 - DNA, 20 bp, homo sapiens
  tDNA91_GlyCCC_1_-_149680210_149680280@9.28.20,trn
ggttcagtggtagaattctc

SEQ ID NO: 3922 - DNA, 21 bp, homo sapiens
  tDNA91_GlyCCC_1_-_149680210_149680280@9.29.21,trn
ggttcagtggtagaattctcg

SEQ ID NO: 3923 - DNA, 22 bp, homo sapiens
  tDNA91_GlyCCC_1_-_149680210_149680280@9.30.22,trn
ggttcagtggtagaattctcgc

SEQ ID NO: 3924 - DNA, 23 bp, homo sapiens
  tDNA91_GlyCCC_1_-_149680210_149680280@9.31.23,trn
ggttcagtggtagaattctcgcc

SEQ ID NO: 3925 - DNA, 24 bp, homo sapiens
  tDNA91_GlyCCC_1_-_149680210_149680280@9.32.24,trn
ggttcagtggtagaattctcgcct

SEQ ID NO: 3926 - DNA, 26 bp, homo sapiens
  tDNA18_GlyGCC_16_+_70822597_70822667@9.34.26,tDNA
ggttcagtggtagaattctcgcctgc

SEQ ID NO: 3927 - DNA, 16 bp, homo sapiens
  tDNA16_ValTAC_11_-_59318460_59318532@1.16.16
ggttccatagtgtagc

SEQ ID NO: 3928 - DNA, 17 bp, homo sapiens
  tDNA16_ValTAC_11_-_59318460_59318532@1.17.17
ggttccatagtgtagcg

SEQ ID NO: 3929 - DNA, 18 bp, homo sapiens
  tDNA16_ValTAC_11_-_59318460_59318532@1.18.18
ggttccatagtgtagcgg

SEQ ID NO: 3930 - DNA, 19 bp, homo sapiens
  tDNA16_ValTAC_11_-_59318460_59318532@1.19.19
ggttccatagtgtagcggt

SEQ ID NO: 3931 - DNA, 20 bp, homo sapiens
  tDNA16_ValTAC_11_-_59318460_59318532@1.20.20
ggttccatagtgtagcggtt

SEQ ID NO: 3932 - DNA, 22 bp, homo sapiens
  tDNA16_ValTAC_11_-_59318460_59318532@1.22.22
ggttccatagtgtagcggttat

SEQ ID NO: 3933 - DNA, 23 bp, homo sapiens
  tDNA16_ValTAC_11_-_59318460_59318532@1.23.23
ggttccatagtgtagcggttatc

SEQ ID NO: 3934 - DNA, 30 bp, homo sapiens
  tDNA16_ValTAC_11_-_59318460_59318532@1.30.30
ggttccatagtgtagcggttatcacgtctg

SEQ ID NO: 3935 - DNA, 16 bp, homo sapiens
  tDNA6_ValTAC_10_-_5895674_5895746@1.16.16,tDNA17_
ggttccatagtgtagt

SEQ ID NO: 3936 - DNA, 17 bp, homo sapiens
  tDNA6_ValTAC_10_-_5895674_5895746@1.17.17,tDNA17_
ggttccatagtgtagtg

SEQ ID NO: 3937 - DNA, 18 bp, homo sapiens
  tDNA6_ValTAC_10_-_5895674_5895746@1.18.18,tDNA17_
ggttccatagtgtagtgg

SEQ ID NO: 3938 - DNA, 19 bp, homo sapiens
  tDNA6_ValTAC_10_-_5895674_5895746@1.19.19,tDNA17_
ggttccatagtgtagtggt

SEQ ID NO: 3939 - DNA, 20 bp, homo sapiens
  tDNA6_ValTAC_10_-_5895674_5895746@1.20.20,tDNA17_
ggttccatagtgtagtggtt

SEQ ID NO: 3940 - DNA, 22 bp, homo sapiens
  tDNA6_ValTAC_10_-_5895674_5895746@1.22.22,tDNA17_
ggttccatagtgtagtggttat

SEQ ID NO: 3941 - DNA, 23 bp, homo sapiens
  tDNA6_ValTAC_10_-_5895674_5895746@1.23.23,tDNA17_
ggttccatagtgtagtggttatc

SEQ ID NO: 3942 - DNA, 24 bp, homo sapiens
  tDNA6_ValTAC_10_-_5895674_5895746@1.24.24,tDNA17_
ggttccatagtgtagtggttatca

SEQ ID NO: 3943 - DNA, 25 bp, homo sapiens
  tDNA6_ValTAC_10_-_5895674_5895746@1.25.25,tDNA17_
ggttccatagtgtagtggttatcac

SEQ ID NO: 3944 - DNA, 26 bp, homo sapiens
  tDNA17_ValTAC_11_-_59318102_59318174@1.26.26,tDNA
ggttccatagtgtagtggttatcacg

SEQ ID NO: 3945 - DNA, 28 bp, homo sapiens
  tDNA17_ValTAC_11_-_59318102_59318174@1.28.28,tDNA
ggttccatagtgtagtggttatcacgtc

SEQ ID NO: 3946 - DNA, 30 bp, homo sapiens
  tDNA17_ValTAC_11_-_59318102_59318174@1.30.30,tDNA
ggttccatagtgtagtggttatcacgtctg

SEQ ID NO: 3947 - DNA, 18 bp, homo sapiens
  tDNA27_GlnCTG_1_+_149079364_149079435@1.18.18,trn
ggttccatggtgtaatgg

SEQ ID NO: 3948 - DNA, 19 bp, homo sapiens
  tDNA27_GlnCTG_1_+_149079364_149079435@1.19.19,trn
ggttccatggtgtaatggt

SEQ ID NO: 3949 - DNA, 29 bp, homo sapiens
  tDNA15_GlnCTG_1_+_145963304_145963375@1.29.29,trn
ggttccatggtgtaatggtgagcactctg

SEQ ID NO: 3950 - DNA, 30 bp, homo sapiens
  tDNA15_GlnCTG_1_+_145963304_145963375@1.30.30,trn
ggttccatggtgtaatggtgagcactctgg

SEQ ID NO: 3951 - DNA, 22 bp, homo sapiens
  tDNA42_GlnCTG_6_+_27263212_27263283@1.22.22,tDNA1
ggttccatggtgtaatggttag

SEQ ID NO: 3952 - DNA, 23 bp, homo sapiens
  tDNA42_GlnCTG_6_+_27263212_27263283@1.23.23,tDNA1
ggttccatggtgtaatggttagc

SEQ ID NO: 3953 - DNA, 24 bp, homo sapiens
  tDNA42_GlnCTG_6_+_27263212_27263283@1.24.24,tDNA1
ggttccatggtgtaatggttagca

SEQ ID NO: 3954 - DNA, 29 bp, homo sapiens
  tDNA42_GlnCTG_6_+_27263212_27263283@1.29.29,tDNA1
ggttccatggtgtaatggttagcactctg

SEQ ID NO: 3955 - DNA, 30 bp, homo sapiens
  tDNA42_GlnCTG_6_+_27263212_27263283@1.30.30,tDNA1
ggttccatggtgtaatggttagcactctgg

SEQ ID NO: 3956 - DNA, 25 bp, homo sapiens
  tDNA4_ArgTCT_17_+_8024243_8024330@52.76.25
ggttcgaatcccaccagagtcgcca

SEQ ID NO: 3957 - DNA, 25 bp, homo sapiens
  tDNA40_ThrAGT_17_-_8042770_8042843@53.77.25,tDNA3
ggttcgaatcccagcggtgcctcca

SEQ ID NO: 3958 - DNA, 25 bp, homo sapiens
  tDNA175_SerGCT_6_-_26305718_26305801@63.87.25,trn
ggttcgaatcccatcctcgtcgcca

SEQ ID NO: 3959 - DNA, 23 bp, homo sapiens
  tDNA3_GluTTC_13_-_45492062_45492133@51.73.23,tDNA
ggttcgactcccggtgtgggaac

SEQ ID NO: 3960 - DNA, 25 bp, homo sapiens
  tDNA3_GluTTC_13_-_45492062_45492133@51.75.25,tDNA
ggttcgactcccggtgtgggaacca

SEQ ID NO: 3961 - DNA, 25 bp, homo sapiens
  tDNA3_ArgTCT_11_+_59318767_59318852@52.76.25,tDNA
ggttcgagtcccaccagagtcgcca

SEQ ID NO: 3962 - DNA, 25 bp, homo sapiens
  tDNA9_ArgTCT_1_+_94313129_94313213@52.76.25
ggttcgagtcccggcggagtcgcca

SEQ ID NO: 3963 - DNA, 25 bp, homo sapiens
  tDNA120_AlaAGC_6_-_28626014_28626085@51.75.25
ggttcgatccccagcatctccacca

SEQ ID NO: 3964 - DNA, 25 bp, homo sapiens
  tDNA119_AlaCGC_6_-_28641613_28641684@51.75.25,trn
ggttcgatccccggcatctccacca

SEQ ID NO: 3965 - DNA, 21 bp, homo sapiens
  tDNA144_AspGTC_6_-_27551236_27551307@51.71.21,trn
ggttcgattccccgacgggga

SEQ ID NO: 3966 - DNA, 22 bp, homo sapiens
  tDNA144_AspGTC_6_-_27551236_27551307@51.72.22,trn
ggttcgattccccgacggggag

SEQ ID NO: 3967 - DNA, 23 bp, homo sapiens
  tDNA144_AspGTC_6_-_27551236_27551307@51.73.23,trn
ggttcgattccccgacggggagc

SEQ ID NO: 3968 - DNA, 24 bp, homo sapiens
  tDNA144_AspGTC_6_-_27551236_27551307@51.74.24,trn
ggttcgattccccgacggggagcc

SEQ ID NO: 3969 - DNA, 25 bp, homo sapiens
  tDNA144_AspGTC_6_-_27551236_27551307@51.75.25,trn
ggttcgattccccgacggggagcca

SEQ ID NO: 3970 - DNA, 25 bp, homo sapiens
  tDNA92_PheGAA_1_-_149672905_149672976@51.75.25,tr
ggttcgattcccggtcagggaacca

SEQ ID NO: 3971 - DNA, 23 bp, homo sapiens
  tDNAMT_SerTGA_MT_-_7446_7514@48.70.23,tDNAlookali
ggttcgattccttccttttttgc

SEQ ID NO: 3972 - DNA, 24 bp, homo sapiens
  tDNAMT_SerTGA_MT_-_7446_7514@48.71.24,tDNAlookali
ggttcgattccttccttttttgcc

SEQ ID NO: 3973 - DNA, 25 bp, homo sapiens
  tDNAMT_SerTGA_MT_-_7446_7514@48.72.25,tDNAlookali
ggttcgattccttccttttttgcca

SEQ ID NO: 3974 - DNA, 25 bp, homo sapiens
  tDNAMT_GlnTTG_MT_-_4329_4400@51.75.25,tDNAlookali
ggttcgattctcatagtcctagcca

SEQ ID NO: 3975 - DNA, 16 bp, homo sapiens
  tDNAMT_GluTTC_MT_-_14674_14742@48.63.16,tDNAlooka
ggttgtagtccgtgcg

SEQ ID NO: 3976 - DNA, 22 bp, homo sapiens
  tDNAMT_GluTTC_MT_-_14674_14742@48.69.22,tDNAlooka
ggttgtagtccgtgcgagaata

SEQ ID NO: 3977 - DNA, 24 bp, homo sapiens
  tDNAMT_GluTTC_MT_-_14674_14742@48.71.24,tDNAlooka
ggttgtagtccgtgcgagaatacc

SEQ ID NO: 3978 - DNA, 25 bp, homo sapiens
  tDNAMT_GluTTC_MT_-_14674_14742@48.72.25,tDNAlooka
ggttgtagtccgtgcgagaatacca

SEQ ID NO: 3979 - DNA, 23 bp, homo sapiens
  tDNAMT_AsnGTT_MT_-_5657_5729@52.74.23,tDNAlookali
ggtttaagtcccattggtctagc

SEQ ID NO: 3980 - DNA, 24 bp, homo sapiens
  tDNAMT_AsnGTT_MT_-_5657_5729@52.75.24,tDNAlookali
ggtttaagtcccattggtctagcc

SEQ ID NO: 3981 - DNA, 21 bp, homo sapiens
  tDNA37_ValAAC_6_+_27203288_27203360@-1G.20.21,trn
ggtttccgtagtgtagtggtt

SEQ ID NO: 3982 - DNA, 23 bp, homo sapiens
  tDNA37_ValAAC_6_+_27203288_27203360@-1G.22.23,trn
ggtttccgtagtgtagtggttat

SEQ ID NO: 3983 - DNA, 19 bp, homo sapiens
  tDNAMT_AlaTGC_MT_-_5587_5655@54.72.19,tDNAlookali
ggttttgcagtccttacca

SEQ ID NO: 3984 - DNA, 21 bp, homo sapiens
  tDNAMT_GluTTC_MT_-_14674_14742@26.46.21,tDNAlooka
ggtttttcatatcattggtcg

SEQ ID NO: 3985 - DNA, 23 bp, homo sapiens
  tDNAMT_GluTTC_MT_-_14674_14742@26.48.23,tDNAlooka
ggtttttcatatcattggtcgtg

SEQ ID NO: 3986 - DNA, 24 bp, homo sapiens
  tDNAMT_GluTTC_MT_-_14674_14742@26.49.24,tDNAlooka
ggtttttcatatcattggtcgtgg

SEQ ID NO: 3987 - DNA, 27 bp, homo sapiens
  tDNAMT_GluTTC_MT_-_14674_14742@26.52.27,tDNAlooka
ggtttttcatatcattggtcgtggttg

SEQ ID NO: 3988 - DNA, 29 bp, homo sapiens
  tDNAMT_GluTTC_MT_-_14674_14742@26.54.29,tDNAlooka
ggtttttcatatcattggtcgtggttgta

SEQ ID NO: 3989 - DNA, 30 bp, homo sapiens
  tDNAMT_GluTTC_MT_-_14674_14742@26.55.30,tDNAlooka
ggtttttcatatcattggtcgtggttgtag

SEQ ID NO: 3990 - DNA, 30 bp, homo sapiens
  tDNAMT_TyrGTA_MT_-_5826_5891@2.31.30
gtaaaatggctgagtgaagcattggactgt

SEQ ID NO: 3991 - DNA, 17 bp, homo sapiens
  tDNA4_ThrTGT_14_+_21149849_21149921@35.51.17,tDNA
gtaaaccaggggtcgcg

SEQ ID NO: 3992 - DNA, 18 bp, homo sapiens
  tDNA4_ThrTGT_14_+_21149849_21149921@35.52.18,tDNA
gtaaaccaggggtcgcga

SEQ ID NO: 3993 - DNA, 19 bp, homo sapiens
  tDNA4_ThrTGT_14_+_21149849_21149921@35.53.19,tDNA
gtaaaccaggggtcgcgag

SEQ ID NO: 3994 - DNA, 20 bp, homo sapiens
  tDNA4_ThrTGT_14_+_21149849_21149921@35.54.20,tDNA
gtaaaccaggggtcgcgagt

SEQ ID NO: 3995 - DNA, 19 bp, homo sapiens
  tDNA15_GlnCTG_1_+_145963304_145963375@12.30.19,tr
gtaatggtgagcactctgg

SEQ ID NO: 3996 - DNA, 22 bp, homo sapiens
  tDNA15_GlnCTG_1_+_145963304_145963375@12.33.22,tr
gtaatggtgagcactctggact

SEQ ID NO: 3997 - DNA, 23 bp, homo sapiens
  tDNA15_GlnCTG_1_+_145963304_145963375@12.34.23,tr
gtaatggtgagcactctggactc

SEQ ID NO: 3998 - DNA, 18 bp, homo sapiens
  tDNA42_GlnCTG_6_+_27263212_27263283@12.29.18,tDNA
gtaatggttagcactctg

SEQ ID NO: 3999 - DNA, 19 bp, homo sapiens
  tDNA42_GlnCTG_6_+_27263212_27263283@12.30.19,tDNA
gtaatggttagcactctgg

SEQ ID NO: 4000 - DNA, 20 bp, homo sapiens
  tDNA42_GlnCTG_6_+_27263212_27263283@12.31.20,tDNA
gtaatggttagcactctgga

SEQ ID NO: 4001 - DNA, 21 bp, homo sapiens
  tDNA42_GlnCTG_6_+_27263212_27263283@12.32.21,tDNA
gtaatggttagcactctggac

SEQ ID NO: 4002 - DNA, 22 bp, homo sapiens
  tDNA42_GlnCTG_6_+_27263212_27263283@12.33.22,tDNA
gtaatggttagcactctggact

SEQ ID NO: 4003 - DNA, 23 bp, homo sapiens
  tDNA42_GlnCTG_6_+_27263212_27263283@12.34.23,tDNA
gtaatggttagcactctggactc

SEQ ID NO: 4004 - DNA, 24 bp, homo sapiens
  tDNA42_GlnCTG_6_+_27263212_27263283@12.35.24,tDNA
gtaatggttagcactctggactct

SEQ ID NO: 4005 - DNA, 25 bp, homo sapiens
  tDNA42_GlnCTG_6_+_27263212_27263283@12.36.25,tDNA
gtaatggttagcactctggactctg

SEQ ID NO: 4006 - DNA, 20 bp, homo sapiens
  tDNA111_HisGTG_1_-_147774845_147774916@22.41.20,t
gtactctgcgttgtggccgc

SEQ ID NO: 4007 - DNA, 17 bp, homo sapiens
  tDNA18_GlyGCC_16_+_70822597_70822667@18.34.17,trn
gtagaattctcgcctgc

SEQ ID NO: 4008 - DNA, 22 bp, homo sapiens
  tDNA25_GlyGCC_16_-_70812114_70812184@18.39.22,trn
gtagaattctcgcctgccacgc

SEQ ID NO: 4009 - DNA, 22 bp, homo sapiens
  tDNAMT_ThrTGT_MT_+_15888_15953@7.28.22
gtagtataaactaatacaccag

SEQ ID NO: 4010 - DNA, 21 bp, homo sapiens
  tDNAMT_GluTTC_MT_-_14674_14742@52.72.21,tDNAlooka
gtagtccgtgcgagaatacca

SEQ ID NO: 4011 - DNA, 16 bp, homo sapiens
  tDNA145_SerAGA_6_-_27521192_27521273@1.16.16,tDNA
gtagtcgtggccgagt

SEQ ID NO: 4012 - DNA, 17 bp, homo sapiens
  tDNA145_SerAGA_6_-_27521192_27521273@1.17.17,tDNA
gtagtcgtggccgagtg

SEQ ID NO: 4013 - DNA, 18 bp, homo sapiens
  tDNA145_SerAGA_6_-_27521192_27521273@1.18.18,tDNA
gtagtcgtggccgagtgg

SEQ ID NO: 4014 - DNA, 19 bp, homo sapiens
  tDNA145_SerAGA_6_-_27521192_27521273@1.19.19,tDNA
gtagtcgtggccgagtggt

SEQ ID NO: 4015 - DNA, 20 bp, homo sapiens
  tDNA145_SerAGA_6_-_27521192_27521273@1.20.20,tDNA
gtagtcgtggccgagtggtt

SEQ ID NO: 4016 - DNA, 21 bp, homo sapiens
  tDNA145_SerAGA_6_-_27521192_27521273@1.21.21,tDNA
gtagtcgtggccgagtggtta

SEQ ID NO: 4017 - DNA, 22 bp, homo sapiens
  tDNA145_SerAGA_6_-_27521192_27521273@1.22.22,tDNA
gtagtcgtggccgagtggttaa

SEQ ID NO: 4018 - DNA, 23 bp, homo sapiens
  tDNA145_SerAGA_6_-_27521192_27521273@1.23.23,tDNA
gtagtcgtggccgagtggttaag

SEQ ID NO: 4019 - DNA, 24 bp, homo sapiens
  tDNA145_SerAGA_6_-_27521192_27521273@1.24.24,tDNA
gtagtcgtggccgagtggttaagg

SEQ ID NO: 4020 - DNA, 25 bp, homo sapiens
  tDNA50_SerAGA_6_+_27499987_27500068@1.25.25,tDNA3
gtagtcgtggccgagtggttaaggc

SEQ ID NO: 4021 - DNA, 30 bp, homo sapiens
  tDNA50_SerAGA_6_+_27499987_27500068@1.30.30,tDNA3
gtagtcgtggccgagtggttaaggcgatgg

SEQ ID NO: 4022 - DNA, 22 bp, homo sapiens
  tDNA106_HisGTG_1_-_149155828_149155899@10.31.22,t
gtatagtggttagtactctgcg

SEQ ID NO: 4023 - DNA, 25 bp, homo sapiens
  tDNA111_HisGTG_1_-_147774845_147774916@10.34.25,t
gtatagtggttagtactctgcgttg

SEQ ID NO: 4024 - DNA, 16 bp, homo sapiens
  tDNA119_AlaCGC_6_-_28641613_28641684@38.53.16,trn
gtatgaggccccgggt

SEQ ID NO: 4025 - DNA, 18 bp, homo sapiens
  tDNA12_ProTGG_11_-_75946869_75946940@18.35.18
gtatgattctcggtttgg

SEQ ID NO: 4026 - DNA, 18 bp, homo sapiens
  tDNA2_SerCGA_12_+_56584148_56584229@1.18.18
gtcacggtggccgagtgg

SEQ ID NO: 4027 - DNA, 24 bp, homo sapiens
  tDNA2_SerCGA_12_+_56584148_56584229@1.24.24
gtcacggtggccgagtggttaagg

SEQ ID NO: 4028 - DNA, 25 bp, homo sapiens
  tDNA2_SerCGA_12_+_56584148_56584229@1.25.25
gtcacggtggccgagtggttaaggc

SEQ ID NO: 4029 - DNA, 17 bp, homo sapiens
  tDNA12_TrpCCA_17_+_19411494_19411565@58.74.17
gtcacgtcggggtcacc

SEQ ID NO: 4030 - DNA, 18 bp, homo sapiens
  tDNA12_TrpCCA_17_+_19411494_19411565@58.75.18
gtcacgtcggggtcacca

SEQ ID NO: 4031 - DNA, 16 bp, homo sapiens
  tDNA66_LeuCAA_1_-_161581736_161581819@1.16.16,trn
gtcaggatggccgagc

SEQ ID NO: 4032 - DNA, 17 bp, homo sapiens
  tDNA17_LeuCAG_16_+_57333863_57333945@1.17.17,tDNA
gtcaggatggccgagcg

SEQ ID NO: 4033 - DNA, 18 bp, homo sapiens
  tDNA17_LeuCAG_16_+_57333863_57333945@1.18.18,tDNA
gtcaggatggccgagcgg

SEQ ID NO: 4034 - DNA, 19 bp, homo sapiens
  tDNA17_LeuCAG_16_+_57333863_57333945@1.19.19,tDNA
gtcaggatggccgagcggt

SEQ ID NO: 4035 - DNA, 20 bp, homo sapiens
  tDNA17_LeuCAG_16_+_57333863_57333945@1.20.20,tDNA
gtcaggatggccgagcggtc

SEQ ID NO: 4036 - DNA, 21 bp, homo sapiens
  tDNA17_LeuCAG_16_+_57333863_57333945@1.21.21,tDNA
gtcaggatggccgagcggtct

SEQ ID NO: 4037 - DNA, 22 bp, homo sapiens
  tDNA17_LeuCAG_16_+_57333863_57333945@1.22.22,tDNA
gtcaggatggccgagcggtcta

SEQ ID NO: 4038 - DNA, 23 bp, homo sapiens
  tDNA17_LeuCAG_16_+_57333863_57333945@1.23.23,tDNA
gtcaggatggccgagcggtctaa

SEQ ID NO: 4039 - DNA, 24 bp, homo sapiens
  tDNA17_LeuCAG_16_+_57333863_57333945@1.24.24,tDNA
gtcaggatggccgagcggtctaag

SEQ ID NO: 4040 - DNA, 25 bp, homo sapiens
  tDNA17_LeuCAG_16_+_57333863_57333945@1.25.25,tDNA
gtcaggatggccgagcggtctaagg

SEQ ID NO: 4041 - DNA, 26 bp, homo sapiens
  tDNA17_LeuCAG_16_+_57333863_57333945@1.26.26,tDNA
gtcaggatggccgagcggtctaaggc

SEQ ID NO: 4042 - DNA, 29 bp, homo sapiens
  tDNA17_LeuCAG_16_+_57333863_57333945@1.29.29,tDNA
gtcaggatggccgagcggtctaaggcgct

SEQ ID NO: 4043 - DNA, 30 bp, homo sapiens
  tDNA17_LeuCAG_16_+_57333863_57333945@1.30.30,tDNA
gtcaggatggccgagcggtctaaggcgctg

SEQ ID NO: 4044 - DNA, 18 bp, homo sapiens
  tDNA141_LeuCAA_6_-_27570348_27570454@1.18.18,tDNA
gtcaggatggccgagtgg

SEQ ID NO: 4045 - DNA, 20 bp, homo sapiens
  tDNA141_LeuCAA_6_-_27570348_27570454@1.20.20,tDNA
gtcaggatggccgagtggtc

SEQ ID NO: 4046 - DNA, 25 bp, homo sapiens
  tDNA141_LeuCAA_6_-_27570348_27570454@1.25.25,tDNA
gtcaggatggccgagtggtctaagg

SEQ ID NO: 4047 - DNA, 26 bp, homo sapiens
  tDNA141_LeuCAA_6_-_27570348_27570454@1.26.26,tDNA
gtcaggatggccgagtggtctaaggc

SEQ ID NO: 4048 - DNA, 18 bp, homo sapiens
  tDNA3_ArgTCT_11_+_59318767_59318852@59.76.18,tDNA
gtcccaccagagtcgcca

SEQ ID NO: 4049 - DNA, 18 bp, homo sapiens
  tDNAMT_AsnGTT_MT_-_5657_5729@59.76.18,tDNAlookali
gtcccattggtctagcca

SEQ ID NO: 4050 - DNA, 18 bp, homo sapiens
  tDNA53_LysTTT_6_+_27543846_27543918@59.76.18,tDNA
gtccctgtccaggcgcca

SEQ ID NO: 4051 - DNA, 18 bp, homo sapiens
  tDNA5_LysTTT_11_+_59323902_59323974@59.76.18,tDNA
gtccctgttcgggcgcca

SEQ ID NO: 4052 - DNA, 18 bp, homo sapiens
  tDNAMT_GluTTC_MT_-_14674_14742@55.72.18,tDNAlooka
gtccgtgcgagaatacca

SEQ ID NO: 4053 - DNA, 18 bp, homo sapiens
  tDNA4_ArgTCG_15_+_89878304_89878376@59.76.18
gtcctgccgcggtcgcca

SEQ ID NO: 4054 - DNA, 17 bp, homo sapiens
  tDNAMT_ThrTGT_MT_+_15888_15953@1.17.17
gtccttgtagtataaac

SEQ ID NO: 4055 - DNA, 18 bp, homo sapiens
  tDNAMT_ThrTGT_MT_+_15888_15953@1.18.18
gtccttgtagtataaact

SEQ ID NO: 4056 - DNA, 19 bp, homo sapiens
  tDNAMT_ThrTGT_MT_+_15888_15953@1.19.19
gtccttgtagtataaacta

SEQ ID NO: 4057 - DNA, 26 bp, homo sapiens
  tDNAMT_ThrTGT_MT_+_15888_15953@1.26.26
gtccttgtagtataaactaatacacc

SEQ ID NO: 4058 - DNA, 27 bp, homo sapiens
  tDNAMT_ThrTGT_MT_+_15888_15953@1.27.27
gtccttgtagtataaactaatacacca

SEQ ID NO: 4059 - DNA, 28 bp, homo sapiens
  tDNAMT_ThrTGT_MT_+_15888_15953@1.28.28
gtccttgtagtataaactaatacaccag

SEQ ID NO: 4060 - DNA, 19 bp, homo sapiens
  tDNA19_TyrGTA_14_-_21121258_21121351@46.64.19,trn
gtcgctggttcgattccgg

SEQ ID NO: 4061 - DNA, 17 bp, homo sapiens
  tDNA149_LysTTT_6_-_27302769_27302841@15.31.17,trn
gtcggtagagcatcaga

SEQ ID NO: 4062 - DNA, 22 bp, homo sapiens
  tDNA149_LysTTT_6_-_27302769_27302841@15.36.22,trn
gtcggtagagcatcagactttt

SEQ ID NO: 4063 - DNA, 18 bp, homo sapiens
  tDNA6_LysCTT_19_-_52425396_52425468@15.32.18,tDNA
gtcggtagagcatgagac

SEQ ID NO: 4064 - DNA, 19 bp, homo sapiens
  tDNA6_LysCTT_19_-_52425396_52425468@15.33.19,tDNA
gtcggtagagcatgagact

SEQ ID NO: 4065 - DNA, 18 bp, homo sapiens
  tDNA4_LysCTT_18_-_43669271_43669343@15.32.18,tDNA
gtcggtagagcatgggac

SEQ ID NO: 4066 - DNA, 16 bp, homo sapiens
  tDNAMT_GluTTC_MT_-_14674_14742@43.58.16,tDNAlooka
gtcgtggttgtagtcc

SEQ ID NO: 4067 - DNA, 19 bp, homo sapiens
  tDNAMT_GluTTC_MT_-_14674_14742@43.61.19,tDNAlooka
gtcgtggttgtagtccgtg

SEQ ID NO: 4068 - DNA, 20 bp, homo sapiens
  tDNAMT_GluTTC_MT_-_14674_14742@43.62.20,tDNAlooka
gtcgtggttgtagtccgtgc

SEQ ID NO: 4069 - DNA, 21 bp, homo sapiens
  tDNAMT_GluTTC_MT_-_14674_14742@43.63.21,tDNAlooka
gtcgtggttgtagtccgtgcg

SEQ ID NO: 4070 - DNA, 22 bp, homo sapiens
  tDNAMT_GluTTC_MT_-_14674_14742@43.64.22,tDNAlooka
gtcgtggttgtagtccgtgcga

SEQ ID NO: 4071 - DNA, 23 bp, homo sapiens
  tDNAMT_GluTTC_MT_-_14674_14742@43.65.23,tDNAlooka
gtcgtggttgtagtccgtgcgag

SEQ ID NO: 4072 - DNA, 24 bp, homo sapiens
  tDNAMT_GluTTC_MT_-_14674_14742@43.66.24,tDNAlooka
gtcgtggttgtagtccgtgcgaga

SEQ ID NO: 4073 - DNA, 25 bp, homo sapiens
  tDNAMT_GluTTC_MT_-_14674_14742@43.67.25,tDNAlooka
gtcgtggttgtagtccgtgcgagaa

SEQ ID NO: 4074 - DNA, 26 bp, homo sapiens
  tDNAMT_GluTTC_MT_-_14674_14742@43.68.26,tDNAlooka
gtcgtggttgtagtccgtgcgagaat

SEQ ID NO: 4075 - DNA, 27 bp, homo sapiens
  tDNAMT_GluTTC_MT_-_14674_14742@43.69.27,tDNAlooka
gtcgtggttgtagtccgtgcgagaata

SEQ ID NO: 4076 - DNA, 29 bp, homo sapiens
  tDNAMT_GluTTC_MT_-_14674_14742@43.71.29,tDNAlooka
gtcgtggttgtagtccgtgcgagaatacc

SEQ ID NO: 4077 - DNA, 24 bp, homo sapiens
  tDNAMT_SerGCT_MT_+_12207_12265@38.61.24
gtctaacaacatggctttctcacc

SEQ ID NO: 4078 - DNA, 25 bp, homo sapiens
  tDNAMT_SerGCT_MT_+_12207_12265@38.62.25
gtctaacaacatggctttctcacca

SEQ ID NO: 4079 - DNA, 20 bp, homo sapiens
  tDNA92_PheGAA_1_-_149672905_149672976@10.29.20,tr
gtctagtggctaggattcgg

SEQ ID NO: 4080 - DNA, 20 bp, homo sapiens
  tDNA25_GluCTC_2_-_71273488_71273560@10.29.20,tDNA
gtctagtggttaggattcgg

SEQ ID NO: 4081 - DNA, 18 bp, homo sapiens
  tDNA112_GlnCTG_1_-_147737382_147737453@58.75.18,t
gtctcggtggaacctcca

SEQ ID NO: 4082 - DNA, 19 bp, homo sapiens
  tDNA20_AsnATT_1_+_147719029_147719102@1.19.19,trn
gtctctgtggcgcaatcgg

SEQ ID NO: 4083 - DNA, 20 bp, homo sapiens
  tDNA20_AsnATT_1_+_147719029_147719102@1.20.20,trn
gtctctgtggcgcaatcggt

SEQ ID NO: 4084 - DNA, 18 bp, homo sapiens
  tDNA86_ArgTCT_1_-_159111401_159111474@1.18.18,trn
gtctctgtggcgcaatgg

SEQ ID NO: 4085 - DNA, 19 bp, homo sapiens
  tDNA86_ArgTCT_1_-_159111401_159111474@1.19.19
gtctctgtggcgcaatgga

SEQ ID NO: 4086 - DNA, 20 bp, homo sapiens
  tDNA86_ArgTCT_1_-_159111401_159111474@1.20.20
gtctctgtggcgcaatggac

SEQ ID NO: 4087 - DNA, 17 bp, homo sapiens
  tDNAMT_TyrGTA_MT_-_5826_5891@15.31.17
gtgaagcattggactgt

SEQ ID NO: 4088 - DNA, 18 bp, homo sapiens
  tDNAMT_TyrGTA_MT_-_5826_5891@15.32.18
gtgaagcattggactgta

SEQ ID NO: 4089 - DNA, 19 bp, homo sapiens
  tDNAMT_TyrGTA_MT_-_5826_5891@15.33.19
gtgaagcattggactgtaa

SEQ ID NO: 4090 - DNA, 20 bp, homo sapiens
  tDNAMT_TyrGTA_MT_-_5826_5891@15.34.20
gtgaagcattggactgtaaa

SEQ ID NO: 4091 - DNA, 22 bp, homo sapiens
  tDNAMT_TyrGTA_MT_-_5826_5891@15.36.22
gtgaagcattggactgtaaatc

SEQ ID NO: 4092 - DNA, 23 bp, homo sapiens
  tDNAMT_TyrGTA_MT_-_5826_5891@15.37.23
gtgaagcattggactgtaaatct

SEQ ID NO: 4093 - DNA, 19 bp, homo sapiens
  tDNA22_AspGTC_5_-_141773988_141774059@18.36.19,tr
gtgagtatccccgcctgtc

SEQ ID NO: 4094 - DNA, 16 bp, homo sapiens
  tDNA111_HisGTG_1_-_147774845_147774916@4.19.16,tr
gtgatcgtatagtggt

SEQ ID NO: 4095 - DNA, 19 bp, homo sapiens
  tDNA111_HisGTG_1_-_147774845_147774916@4.22.19,tr
gtgatcgtatagtggttag

SEQ ID NO: 4096 - DNA, 20 bp, homo sapiens
  tDNA111_HisGTG_1_-_147774845_147774916@4.23.20,tr
gtgatcgtatagtggttagt

SEQ ID NO: 4097 - DNA, 21 bp, homo sapiens
  tDNA111_HisGTG_1_-_147774845_147774916@4.24.21,tr
gtgatcgtatagtggttagta

SEQ ID NO: 4098 - DNA, 22 bp, homo sapiens
  tDNA111_HisGTG_1_-_147774845_147774916@4.25.22,tr
gtgatcgtatagtggttagtac

SEQ ID NO: 4099 - DNA, 24 bp, homo sapiens
  tDNA111_HisGTG_1_-_147774845_147774916@4.27.24,tr
gtgatcgtatagtggttagtactc

SEQ ID NO: 4100 - DNA, 25 bp, homo sapiens
  tDNA111_HisGTG_1_-_147774845_147774916@4.28.25,tr
gtgatcgtatagtggttagtactct

SEQ ID NO: 4101 - DNA, 26 bp, homo sapiens
  tDNA111_HisGTG_1_-_147774845_147774916@4.29.26,tr
gtgatcgtatagtggttagtactctg

SEQ ID NO: 4102 - DNA, 27 bp, homo sapiens
  tDNA111_HisGTG_1_-_147774845_147774916@4.30.27,tr
gtgatcgtatagtggttagtactctgc

SEQ ID NO: 4103 - DNA, 29 bp, homo sapiens
  tDNA111_HisGTG_1_-_147774845_147774916@4.32.29,tr
gtgatcgtatagtggttagtactctgcgt

SEQ ID NO: 4104 - DNA, 30 bp, homo sapiens
  tDNA111_HisGTG_1_-_147774845_147774916@4.33.30,tr
gtgatcgtatagtggttagtactctgcgtt

SEQ ID NO: 4105 - DNA, 23 bp, homo sapiens
  tDNAMT_LeuTAG_MT_+_12266_12336@51.73.23
gtgcaactccaaataaaagtacc

SEQ ID NO: 4106 - DNA, 24 bp, homo sapiens
  tDNAMT_LeuTAG_MT_+_12266_12336@51.74.24
gtgcaactccaaataaaagtacca

SEQ ID NO: 4107 - DNA, 26 bp, homo sapiens
  tDNAMT_ProTGG_MT_-_15956_16023@44.69.26
gtggagttaaagactttttctctgac

SEQ ID NO: 4108 - DNA, 27 bp, homo sapiens
  tDNAMT_ProTGG_MT_-_15956_16023@44.70.27
gtggagttaaagactttttctctgacc

SEQ ID NO: 4109 - DNA, 28 bp, homo sapiens
  tDNAMT_ProTGG_MT_-_15956_16023@44.71.28
gtggagttaaagactttttctctgacca

SEQ ID NO: 4110 - DNA, 20 bp, homo sapiens
  tDNA3_CysGCA_15_+_80036997_80037069@15.34.20
gtgggtagagcatttgactg

SEQ ID NO: 4111 - DNA, 28 bp, homo sapiens
  tDNA34_LeuCAG_1_+_161411323_161411405@59.86.28,tr
gtgggttcgaatcccactcctgacacca

SEQ ID NO: 4112 - DNA, 28 bp, homo sapiens
  tDNA17_LeuCAG_16_+_57333863_57333945@59.86.28,trn
gtgggttcgaatcccacttctgacacca

SEQ ID NO: 4113 - DNA, 16 bp, homo sapiens
  tDNA91_GlyCCC_1_-_149680210_149680280@15.30.16,tr
gtggtagaattctcgc

SEQ ID NO: 4114 - DNA, 17 bp, homo sapiens
  tDNA91_GlyCCC_1_-_149680210_149680280@15.31.17,tr
gtggtagaattctcgcc

SEQ ID NO: 4115 - DNA, 18 bp, homo sapiens
  tDNA91_GlyCCC_1_-_149680210_149680280@15.32.18,tr
gtggtagaattctcgcct

SEQ ID NO: 4116 - DNA, 20 bp, homo sapiens
  tDNA18_GlyGCC_16_+_70822597_70822667@15.34.20,trn
gtggtagaattctcgcctgc

SEQ ID NO: 4117 - DNA, 21 bp, homo sapiens
  tDNA18_GlyGCC_16_+_70822597_70822667@15.35.21,trn
gtggtagaattctcgcctgcc

SEQ ID NO: 4118 - DNA, 16 bp, homo sapiens
  tDNA127_CysGCA_1_-_93981834_93981906@16.31.16,trn
gtggtagagcatttga

SEQ ID NO: 4119 - DNA, 18 bp, homo sapiens
  tDNA127_CysGCA_1_-_93981834_93981906@16.33.18,trn
gtggtagagcatttgact

SEQ ID NO: 4120 - DNA, 19 bp, homo sapiens
  tDNA127_CysGCA_1_-_93981834_93981906@16.34.19,trn
gtggtagagcatttgactg

SEQ ID NO: 4121 - DNA, 20 bp, homo sapiens
  tDNA127_CysGCA_1_-_93981834_93981906@16.35.20,trn
gtggtagagcatttgactgc

SEQ ID NO: 4122 - DNA, 23 bp, homo sapiens
  tDNA59_GluCTC_1_+_249168447_249168518@7.29.23,trn
gtggtctagtggttaggattcgg

SEQ ID NO: 4123 - DNA, 26 bp, homo sapiens
  tDNA59_GluCTC_1_+_249168447_249168518@7.32.26,trn
gtggtctagtggttaggattcggcgc

SEQ ID NO: 4124 - DNA, 17 bp, homo sapiens
  tDNA25_GluCTC_2_-_71273488_71273560@15.31.17,tDNA
gtggttaggattcggcg

SEQ ID NO: 4125 - DNA, 18 bp, homo sapiens
  tDNA25_GluCTC_2_-_71273488_71273560@15.32.18,tDNA
gtggttaggattcggcgc

SEQ ID NO: 4126 - DNA, 19 bp, homo sapiens
  tDNA25_GluCTC_2_-_71273488_71273560@15.33.19,tDNA
gtggttaggattcggcgct

SEQ ID NO: 4127 - DNA, 20 bp, homo sapiens
  tDNA25_GluCTC_2_-_71273488_71273560@15.34.20,tDNA
gtggttaggattcggcgctc

SEQ ID NO: 4128 - DNA, 21 bp, homo sapiens
  tDNA25_GluCTC_2_-_71273488_71273560@15.35.21,tDNA
gtggttaggattcggcgctct

SEQ ID NO: 4129 - DNA, 22 bp, homo sapiens
  tDNA25_GluCTC_2_-_71273488_71273560@15.36.22,tDNA
gtggttaggattcggcgctctc

SEQ ID NO: 4130 - DNA, 23 bp, homo sapiens
  tDNA25_GluCTC_2_-_71273488_71273560@15.37.23,tDNA
gtggttaggattcggcgctctca

SEQ ID NO: 4131 - DNA, 24 bp, homo sapiens
  tDNA10_GluCTC_3_-_103879524_103879595@15.38.24,tr
gtggttaggattcggcgctctcac

SEQ ID NO: 4132 - DNA, 25 bp, homo sapiens
  tDNA10_GluCTC_3_-_103879524_103879595@15.39.25,tr
gtggttaggattcggcgctctcacc

SEQ ID NO: 4133 - DNA, 27 bp, homo sapiens
  tDNA10_GluCTC_3_-_103879524_103879595@15.41.27,tr
gtggttaggattcggcgctctcaccgc

SEQ ID NO: 4134 - DNA, 16 bp, homo sapiens
  tDNA106_HisGTG_1_-_149155828_149155899@15.30.16,t
gtggttagtactctgc

SEQ ID NO: 4135 - DNA, 17 bp, homo sapiens
  tDNA106_HisGTG_1_-_149155828_149155899@15.31.17,t
gtggttagtactctgcg

SEQ ID NO: 4136 - DNA, 18 bp, homo sapiens
  tDNA111_HisGTG_1_-_147774845_147774916@15.32.18,t
gtggttagtactctgcgt

SEQ ID NO: 4137 - DNA, 19 bp, homo sapiens
  tDNA111_HisGTG_1_-_147774845_147774916@15.33.19,t
gtggttagtactctgcgtt

SEQ ID NO: 4138 - DNA, 20 bp, homo sapiens
  tDNA111_HisGTG_1_-_147774845_147774916@15.34.20,t
gtggttagtactctgcgttg

SEQ ID NO: 4139 - DNA, 21 bp, homo sapiens
  tDNA111_HisGTG_1_-_147774845_147774916@15.35.21,t
gtggttagtactctgcgttgt

SEQ ID NO: 4140 - DNA, 22 bp, homo sapiens
  tDNA111_HisGTG_1_-_147774845_147774916@15.36.22,t
gtggttagtactctgcgttgtg

SEQ ID NO: 4141 - DNA, 23 bp, homo sapiens
  tDNA111_HisGTG_1_-_147774845_147774916@15.37.23,t
gtggttagtactctgcgttgtgg

SEQ ID NO: 4142 - DNA, 24 bp, homo sapiens
  tDNA111_HisGTG_1_-_147774845_147774916@15.38.24,t
gtggttagtactctgcgttgtggc

SEQ ID NO: 4143 - DNA, 25 bp, homo sapiens
  tDNA111_HisGTG_1_-_147774845_147774916@15.39.25,t
gtggttagtactctgcgttgtggcc

SEQ ID NO: 4144 - DNA, 21 bp, homo sapiens
  tDNA91_GlyCCC_1_-_149680210_149680280@7.27.21,trn
gtggttcagtggtagaattct

SEQ ID NO: 4145 - DNA, 22 bp, homo sapiens
  tDNA91_GlyCCC_1_-_149680210_149680280@7.28.22,trn
gtggttcagtggtagaattctc

SEQ ID NO: 4146 - DNA, 23 bp, homo sapiens
  tDNA91_GlyCCC_1_-_149680210_149680280@7.29.23,trn
gtggttcagtggtagaattctcg

SEQ ID NO: 4147 - DNA, 24 bp, homo sapiens
  tDNA91_GlyCCC_1_-_149680210_149680280@7.30.24,trn
gtggttcagtggtagaattctcgc

SEQ ID NO: 4148 - DNA, 25 bp, homo sapiens
  tDNA91_GlyCCC_1_-_149680210_149680280@7.31.25,trn
gtggttcagtggtagaattctcgcc

SEQ ID NO: 4149 - DNA, 26 bp, homo sapiens
  tDNA91_GlyCCC_1_-_149680210_149680280@7.32.26,trn
gtggttcagtggtagaattctcgcct

SEQ ID NO: 4150 - DNA, 28 bp, homo sapiens
  tDNA18_GlyGCC_16_+_70822597_70822667@7.34.28,tDNA
gtggttcagtggtagaattctcgcctgc

SEQ ID NO: 4151 - DNA, 17 bp, homo sapiens
  tDNAMT_GluTTC_MT_-_14674_14742@46.62.17,tDNAlooka
gtggttgtagtccgtgc

SEQ ID NO: 4152 - DNA, 18 bp, homo sapiens
  tDNAMT_GluTTC_MT_-_14674_14742@46.63.18,tDNAlooka
gtggttgtagtccgtgcg

SEQ ID NO: 4153 - DNA, 19 bp, homo sapiens
  tDNAMT_GluTTC_MT_-_14674_14742@46.64.19,tDNAlooka
gtggttgtagtccgtgcga

SEQ ID NO: 4154 - DNA, 20 bp, homo sapiens
  tDNAMT_GluTTC_MT_-_14674_14742@46.65.20,tDNAlooka
gtggttgtagtccgtgcgag

SEQ ID NO: 4155 - DNA, 21 bp, homo sapiens
  tDNAMT_GluTTC_MT_-_14674_14742@46.66.21,tDNAlooka
gtggttgtagtccgtgcgaga

SEQ ID NO: 4156 - DNA, 22 bp, homo sapiens
  tDNAMT_GluTTC_MT_-_14674_14742@46.67.22,tDNAlooka
gtggttgtagtccgtgcgagaa

SEQ ID NO: 4157 - DNA, 23 bp, homo sapiens
  tDNAMT_GluTTC_MT_-_14674_14742@46.68.23,tDNAlooka
gtggttgtagtccgtgcgagaat

SEQ ID NO: 4158 - DNA, 24 bp, homo sapiens
  tDNAMT_GluTTC_MT_-_14674_14742@46.69.24,tDNAlooka
gtggttgtagtccgtgcgagaata

SEQ ID NO: 4159 - DNA, 25 bp, homo sapiens
  tDNAMT_GluTTC_MT_-_14674_14742@46.70.25,tDNAlooka
gtggttgtagtccgtgcgagaatac

SEQ ID NO: 4160 - DNA, 26 bp, homo sapiens
  tDNAMT_GluTTC_MT_-_14674_14742@46.71.26,tDNAlooka
gtggttgtagtccgtgcgagaatacc

SEQ ID NO: 4161 - DNA, 27 bp, homo sapiens
  tDNAMT_GluTTC_MT_-_14674_14742@46.72.27,tDNAlooka
gtggttgtagtccgtgcgagaatacca

SEQ ID NO: 4162 - DNA, 25 bp, homo sapiens
  tDNA22_GlnCTG_1_+_147800937_147801008@10.34.25,tr
gtgtaatggtaagcactctggactc

SEQ ID NO: 4163 - DNA, 25 bp, homo sapiens
  tDNA15_GlnCTG_1_+_145963304_145963375@10.34.25,tr
gtgtaatggtgagcactctggactc

SEQ ID NO: 4164 - DNA, 21 bp, homo sapiens
  tDNA42_GlnCTG_6_+_27263212_27263283@10.30.21,tDNA
gtgtaatggttagcactctgg

SEQ ID NO: 4165 - DNA, 22 bp, homo sapiens
  tDNA42_GlnCTG_6_+_27263212_27263283@10.31.22,tDNA
gtgtaatggttagcactctgga

SEQ ID NO: 4166 - DNA, 24 bp, homo sapiens
  tDNA42_GlnCTG_6_+_27263212_27263283@10.33.24,tDNA
gtgtaatggttagcactctggact

SEQ ID NO: 4167 - DNA, 25 bp, homo sapiens
  tDNA42_GlnCTG_6_+_27263212_27263283@10.34.25,tDNA
gtgtaatggttagcactctggactc

SEQ ID NO: 4168 - DNA, 16 bp, homo sapiens
  tDNA13_AlaCGC_2_+_157257281_157257352@38.53.16
gtgtgaggtcccgggt

SEQ ID NO: 4169 - DNA, 20 bp, homo sapiens
  tDNAMT_ProTGG_MT_-_15956_16023@49.68.20
gttaaagactttttctctga

SEQ ID NO: 4170 - DNA, 21 bp, homo sapiens
  tDNAMT_ProTGG_MT_-_15956_16023@49.69.21
gttaaagactttttctctgac

SEQ ID NO: 4171 - DNA, 22 bp, homo sapiens
  tDNAMT_ProTGG_MT_-_15956_16023@49.70.22
gttaaagactttttctctgacc

SEQ ID NO: 4172 - DNA, 23 bp, homo sapiens
  tDNAMT_ProTGG_MT_-_15956_16023@49.71.23
gttaaagactttttctctgacca

SEQ ID NO: 4173 - DNA, 19 bp, homo sapiens
  tDNAMT_LysTTT_MT_+_8295_8364@34.52.19,tDNAlookali
gttaaagattaagagaacc

SEQ ID NO: 4174 - DNA, 20 bp, homo sapiens
  tDNAMT_LysTTT_MT_+_8295_8364@34.53.20,tDNAlookali
gttaaagattaagagaacca

SEQ ID NO: 4175 - DNA, 25 bp, homo sapiens
  tDNAMT_LysTTT_MT_+_8295_8364@34.58.25,tDNAlookali
gttaaagattaagagaaccaacacc

SEQ ID NO: 4176 - DNA, 22 bp, homo sapiens
  tDNAMT_AsnGTT_MT_-_5657_5729@34.55.22,tDNAlookali
gttaactaagtgtttgtgggtt

SEQ ID NO: 4177 - DNA, 23 bp, homo sapiens
  tDNAMT_AsnGTT_MT_-_5657_5729@34.56.23,tDNAlookali
gttaactaagtgtttgtgggttt

SEQ ID NO: 4178 - DNA, 16 bp, homo sapiens
  tDNA4_LeuTAA_20_-_55933428_55933502@1.16.16,tDNA6
gttaagatggcagagc

SEQ ID NO: 4179 - DNA, 17 bp, homo sapiens
  tDNA4_LeuTAA_20_-_55933428_55933502@1.17.17,tDNA6
gttaagatggcagagcc

SEQ ID NO: 4180 - DNA, 18 bp, homo sapiens
  tDNA4_LeuTAA_20_-_55933428_55933502@1.18.18,tDNA6
gttaagatggcagagccc

SEQ ID NO: 4181 - DNA, 19 bp, homo sapiens
  tDNAMT_LeuTAA_MT_+_3230_3304@1.19.19,tDNA2_LeuTAA
gttaagatggcagagcccg

SEQ ID NO: 4182 - DNA, 20 bp, homo sapiens
  tDNAMT_LeuTAA_MT_+_3230_3304@1.20.20,tDNA2_LeuTAA
gttaagatggcagagcccgg

SEQ ID NO: 4183 - DNA, 21 bp, homo sapiens
  tDNA2_LeuTAA_X_-_55207755_55207829@1.21.21
gttaagatggcagagcccggc

SEQ ID NO: 4184 - DNA, 22 bp, homo sapiens
  tDNA2_LeuTAA_X_-_55207755_55207829@1.22.22
gttaagatggcagagcccggca

SEQ ID NO: 4185 - DNA, 23 bp, homo sapiens
  tDNA2_LeuTAA_X_-_55207755_55207829@1.23.23
gttaagatggcagagcccggcaa

SEQ ID NO: 4186 - DNA, 21 bp, homo sapiens
  tDNAMT_LeuTAA_MT_+_3230_3304@1.21.21
gttaagatggcagagcccggt

SEQ ID NO: 4187 - DNA, 22 bp, homo sapiens
  tDNAMT_LeuTAA_MT_+_3230_3304@1.22.22
gttaagatggcagagcccggta

SEQ ID NO: 4188 - DNA, 23 bp, homo sapiens
  tDNAMT_LeuTAA_MT_+_3230_3304@1.23.23
gttaagatggcagagcccggtaa

SEQ ID NO: 4189 - DNA, 24 bp, homo sapiens
  tDNAMT_LeuTAA_MT_+_3230_3304@1.24.24
gttaagatggcagagcccggtaat

SEQ ID NO: 4190 - DNA, 25 bp, homo sapiens
  tDNAMT_LeuTAA_MT_+_3230_3304@1.25.25
gttaagatggcagagcccggtaatc

SEQ ID NO: 4191 - DNA, 26 bp, homo sapiens
  tDNAMT_LeuTAA_MT_+_3230_3304@1.26.26
gttaagatggcagagcccggtaatcg

SEQ ID NO: 4192 - DNA, 27 bp, homo sapiens
  tDNAMT_LeuTAA_MT_+_3230_3304@1.27.27
gttaagatggcagagcccggtaatcgc

SEQ ID NO: 4193 - DNA, 28 bp, homo sapiens
  tDNAMT_LeuTAA_MT_+_3230_3304@1.28.28
gttaagatggcagagcccggtaatcgca

SEQ ID NO: 4194 - DNA, 29 bp, homo sapiens
  tDNAMT_LeuTAA_MT_+_3230_3304@1.29.29
gttaagatggcagagcccggtaatcgcat

SEQ ID NO: 4195 - DNA, 16 bp, homo sapiens
  tDNA42_GlnCTG_6_+_27263212_27263283@18.33.16,tDNA
gttagcactctggact

SEQ ID NO: 4196 - DNA, 17 bp, homo sapiens
  tDNA42_GlnCTG_6_+_27263212_27263283@18.34.17,tDNA
gttagcactctggactc

SEQ ID NO: 4197 - DNA, 18 bp, homo sapiens
  tDNA42_GlnCTG_6_+_27263212_27263283@18.35.18,tDNA
gttagcactctggactct

SEQ ID NO: 4198 - DNA, 19 bp, homo sapiens
  tDNA42_GlnCTG_6_+_27263212_27263283@18.36.19,tDNA
gttagcactctggactctg

SEQ ID NO: 4199 - DNA, 20 bp, homo sapiens
  tDNA42_GlnCTG_6_+_27263212_27263283@18.37.20,tDNA
gttagcactctggactctga

SEQ ID NO: 4200 - DNA, 21 bp, homo sapiens
  tDNA42_GlnCTG_6_+_27263212_27263283@18.38.21,tDNA
gttagcactctggactctgaa

SEQ ID NO: 4201 - DNA, 22 bp, homo sapiens
  tDNA42_GlnCTG_6_+_27263212_27263283@18.39.22,tDNA
gttagcactctggactctgaat

SEQ ID NO: 4202 - DNA, 23 bp, homo sapiens
  tDNA42_GlnCTG_6_+_27263212_27263283@18.40.23,tDNA
gttagcactctggactctgaatc

SEQ ID NO: 4203 - DNA, 24 bp, homo sapiens
  tDNA42_GlnCTG_6_+_27263212_27263283@18.41.24,tDNA
gttagcactctggactctgaatcc

SEQ ID NO: 4204 - DNA, 26 bp, homo sapiens
  tDNA146_GlnCTG_6_-_27515531_27515602@18.43.26,trn
gttagcactctggactctgaatccag

SEQ ID NO: 4205 - DNA, 27 bp, homo sapiens
  tDNA146_GlnCTG_6_-_27515531_27515602@18.44.27,trn
gttagcactctggactctgaatccagc

SEQ ID NO: 4206 - DNA, 28 bp, homo sapiens
  tDNA146_GlnCTG_6_-_27515531_27515602@18.45.28,trn
gttagcactctggactctgaatccagcg

SEQ ID NO: 4207 - DNA, 19 bp, homo sapiens
  tDNA130_GlnTTG_6_-_27763640_27763711@18.36.19,trn
gttagcactctggactttg

SEQ ID NO: 4208 - DNA, 20 bp, homo sapiens
  tDNA130_GlnTTG_6_-_27763640_27763711@18.37.20,trn
gttagcactctggactttga

SEQ ID NO: 4209 - DNA, 21 bp, homo sapiens
  tDNA130_GlnTTG_6_-_27763640_27763711@18.38.21,trn
gttagcactctggactttgaa

SEQ ID NO: 4210 - DNA, 23 bp, homo sapiens
  tDNA130_GlnTTG_6_-_27763640_27763711@18.40.23,trn
gttagcactctggactttgaatc

SEQ ID NO: 4211 - DNA, 24 bp, homo sapiens
  tDNA130_GlnTTG_6_-_27763640_27763711@18.41.24,trn
gttagcactctggactttgaatcc

SEQ ID NO: 4212 - DNA, 20 bp, homo sapiens
  tDNA25_GluCTC_2_-_71273488_71273560@18.37.20,tDNA
gttaggattcggcgctctca

SEQ ID NO: 4213 - DNA, 21 bp, homo sapiens
  tDNA10_GluCTC_3_-_103879524_103879595@18.38.21,tr
gttaggattcggcgctctcac

SEQ ID NO: 4214 - DNA, 22 bp, homo sapiens
  tDNA10_GluCTC_3_-_103879524_103879595@18.39.22,tr
gttaggattcggcgctctcacc

SEQ ID NO: 4215 - DNA, 24 bp, homo sapiens
  tDNA10_GluCTC_3_-_103879524_103879595@18.41.24,tr
gttaggattcggcgctctcaccgc

SEQ ID NO: 4216 - DNA, 25 bp, homo sapiens
  tDNA10_GluCTC_3_-_103879524_103879595@18.42.25,tr
gttaggattcggcgctctcaccgcc

SEQ ID NO: 4217 - DNA, 21 bp, homo sapiens
  tDNAMT_TyrGTA_MT_-_5826_5891@48.68.21
gttaggcctctttttaccacc

SEQ ID NO: 4218 - DNA, 22 bp, homo sapiens
  tDNAMT_TyrGTA_MT_-_5826_5891@48.69.22
gttaggcctctttttaccacca

SEQ ID NO: 4219 - DNA, 17 bp, homo sapiens
  tDNA111_HisGTG_1_-_147774845_147774916@18.34.17,t
gttagtactctgcgttg

SEQ ID NO: 4220 - DNA, 18 bp, homo sapiens
  tDNA111_HisGTG_1_-_147774845_147774916@18.35.18,t
gttagtactctgcgttgt

SEQ ID NO: 4221 - DNA, 19 bp, homo sapiens
  tDNA111_HisGTG_1_-_147774845_147774916@18.36.19,t
gttagtactctgcgttgtg

SEQ ID NO: 4222 - DNA, 20 bp, homo sapiens
  tDNA111_HisGTG_1_-_147774845_147774916@18.37.20,t
gttagtactctgcgttgtgg

SEQ ID NO: 4223 - DNA, 21 bp, homo sapiens
  tDNA111_HisGTG_1_-_147774845_147774916@18.38.21,t
gttagtactctgcgttgtggc

SEQ ID NO: 4224 - DNA, 22 bp, homo sapiens
  tDNA111_HisGTG_1_-_147774845_147774916@18.39.22,t
gttagtactctgcgttgtggcc

SEQ ID NO: 4225 - DNA, 23 bp, homo sapiens
  tDNA111_HisGTG_1_-_147774845_147774916@18.40.23,t
gttagtactctgcgttgtggccg

SEQ ID NO: 4226 - DNA, 24 bp, homo sapiens
  tDNA111_HisGTG_1_-_147774845_147774916@18.41.24,t
gttagtactctgcgttgtggccgc

SEQ ID NO: 4227 - DNA, 21 bp, homo sapiens
  tDNAMT_MetCAT_MT_+_4402_4469@49.69.21
gttatacccttcccgtactac

SEQ ID NO: 4228 - DNA, 22 bp, homo sapiens
  tDNAMT_MetCAT_MT_+_4402_4469@49.70.22
gttatacccttcccgtactacc

SEQ ID NO: 4229 - DNA, 23 bp, homo sapiens
  tDNAMT_MetCAT_MT_+_4402_4469@49.71.23
gttatacccttcccgtactacca

SEQ ID NO: 4230 - DNA, 24 bp, homo sapiens
  tDNA1_TrpCCA_7_+_99067307_99067378@52.75.24,tDNA6
gttcaaatcacgtcggggtcacca

SEQ ID NO: 4231 - DNA, 24 bp, homo sapiens
  tDNA29_CysGCA_17_-_37017937_37018008@52.75.24,trn
gttcaaatccgggtgccccctcca

SEQ ID NO: 4232 - DNA, 24 bp, homo sapiens
  tDNA42_GlnCTG_6_+_27263212_27263283@52.75.24,tDNA
gttcaaatctcggtggaacctcca

SEQ ID NO: 4233 - DNA, 24 bp, homo sapiens
  tDNA12_TrpCCA_17_+_19411494_19411565@52.75.24
gttcaagtcacgtcggggtcacca

SEQ ID NO: 4234 - DNA, 24 bp, homo sapiens
  tDNA5_LysTTT_11_+_59323902_59323974@53.76.24,tDNA
gttcaagtccctgttcgggcgcca

SEQ ID NO: 4235 - DNA, 24 bp, homo sapiens
  tDNA65_AlaAGC_6_+_28574933_28575004@52.75.24,tDNA
gttcaatccccggcacctccacca

SEQ ID NO: 4236 - DNA, 24 bp, homo sapiens
  tDNA13_AlaCGC_2_+_157257281_157257352@52.75.24,tr
gttcaatccccggcatctccacca

SEQ ID NO: 4237 - DNA, 17 bp, homo sapiens
  tDNA17_LeuCAG_16_+_57333863_57333945@32.48.17,trn
gttcaggtcgcagtctc

SEQ ID NO: 4238 - DNA, 18 bp, homo sapiens
  tDNA17_LeuCAG_16_+_57333863_57333945@32.49.18,trn
gttcaggtcgcagtctcc

SEQ ID NO: 4239 - DNA, 19 bp, homo sapiens
  tDNA17_LeuCAG_16_+_57333863_57333945@32.50.19,trn
gttcaggtcgcagtctccc

SEQ ID NO: 4240 - DNA, 20 bp, homo sapiens
  tDNA17_LeuCAG_16_+_57333863_57333945@32.51.20,trn
gttcaggtcgcagtctcccc

SEQ ID NO: 4241 - DNA, 19 bp, homo sapiens
  tDNA91_GlyCCC_1_-_149680210_149680280@10.28.19,tr
gttcagtggtagaattctc

SEQ ID NO: 4242 - DNA, 20 bp, homo sapiens
  tDNA91_GlyCCC_1_-_149680210_149680280@10.29.20,tr
gttcagtggtagaattctcg

SEQ ID NO: 4243 - DNA, 21 bp, homo sapiens
  tDNA91_GlyCCC_1_-_149680210_149680280@10.30.21,tr
gttcagtggtagaattctcgc

SEQ ID NO: 4244 - DNA, 22 bp, homo sapiens
  tDNA91_GlyCCC_1_-_149680210_149680280@10.31.22,tr
gttcagtggtagaattctcgcc

SEQ ID NO: 4245 - DNA, 23 bp, homo sapiens
  tDNA91_GlyCCC_1_-_149680210_149680280@10.32.23,tr
gttcagtggtagaattctcgcct

SEQ ID NO: 4246 - DNA, 24 bp, homo sapiens
  tDNA18_GlyGCC_16_+_70822597_70822667@10.33.24,trn
gttcagtggtagaattctcgcctg

SEQ ID NO: 4247 - DNA, 25 bp, homo sapiens
  tDNA18_GlyGCC_16_+_70822597_70822667@10.34.25,trn
gttcagtggtagaattctcgcctgc

SEQ ID NO: 4248 - DNA, 26 bp, homo sapiens
  tDNA18_GlyGCC_16_+_70822597_70822667@10.35.26,trn
gttcagtggtagaattctcgcctgcc

SEQ ID NO: 4249 - DNA, 24 bp, homo sapiens
  tDNA6_TrpCCA_12_+_98898030_98898101@52.75.24
gttcgaatcacgtcggggtcacca

SEQ ID NO: 4250 - DNA, 24 bp, homo sapiens
  tDNA4_ArgTCT_17_+_8024243_8024330@53.76.24
gttcgaatcccaccagagtcgcca

SEQ ID NO: 4251 - DNA, 24 bp, homo sapiens
  tDNA1_LeuAAG_14_+_21078291_21078372@62.85.24,tDNA
gttcgaatcccaccgctgccacca

SEQ ID NO: 4252 - DNA, 24 bp, homo sapiens
  tDNA17_LeuCAG_16_+_57333863_57333945@63.86.24,trn
gttcgaatcccacttctgacacca

SEQ ID NO: 4253 - DNA, 24 bp, homo sapiens
  tDNA34_ThrAGT_6_+_27130050_27130123@54.77.24,tDNA
gttcgaatcccagcggggcctcca

SEQ ID NO: 4254 - DNA, 24 bp, homo sapiens
  tDNA40_ThrAGT_17_-_8042770_8042843@54.77.24,tDNA3
gttcgaatcccagcggtgcctcca

SEQ ID NO: 4255 - DNA, 24 bp, homo sapiens
  tDNA175_SerGCT_6_-_26305718_26305801@64.87.24,trn
gttcgaatcccatcctcgtcgcca

SEQ ID NO: 4256 - DNA, 24 bp, homo sapiens
  tDNA14_TyrGTA_6_+_26569086_26569176@53.76.24,tDNA
gttcgaatccggctcgaaggacca

SEQ ID NO: 4257 - DNA, 24 bp, homo sapiens
  tDNA145_SerAGA_6_-_27521192_27521273@62.85.24,trn
gttcgaatcctgccgactacgcca

SEQ ID NO: 4258 - DNA, 24 bp, homo sapiens
  tDNA5_GluTTC_13_-_41634874_41634945@52.75.24,tDNA
gttcgactcccggtatgggaacca

SEQ ID NO: 4259 - DNA, 24 bp, homo sapiens
  tDNA3_GluTTC_13_-_45492062_45492133@52.75.24,tDNA
gttcgactcccggtgtgggaacca

SEQ ID NO: 4260 - DNA, 24 bp, homo sapiens
  tDNA10_LysCTT_16_+_3241501_3241573@53.76.24,tDNA3
gttcgagccccacgttgggcgcca

SEQ ID NO: 4261 - DNA, 24 bp, homo sapiens
  tDNA16_ValTAC_11_-_59318460_59318532@53.76.24,trn
gttcgagccccagtggaaccacca

SEQ ID NO: 4262 - DNA, 24 bp, homo sapiens
  tDNA112_GlnCTG_1_-_147737382_147737453@52.75.24,t
gttcgagtctcggtggaacctcca

SEQ ID NO: 4263 - DNA, 24 bp, homo sapiens
  tDNA120_AlaAGC_6_-_28626014_28626085@52.75.24
gttcgatccccagcatctccacca

SEQ ID NO: 4264 - DNA, 24 bp, homo sapiens
  tDNA108_AlaAGC_6_-_28763741_28763812@52.75.24
gttcgatccccagtacctccacca

SEQ ID NO: 4265 - DNA, 24 bp, homo sapiens
  tDNA113_AlaTGC_6_-_28726141_28726212@52.75.24,trn
gttcgatccccggcacctccacca

SEQ ID NO: 4266 - DNA, 24 bp, homo sapiens
  tDNA119_AlaCGC_6_-_28641613_28641684@52.75.24,trn
gttcgatccccggcatctccacca

SEQ ID NO: 4267 - DNA, 24 bp, homo sapiens
  tDNA15_PheGAA_11_-_59324970_59325042@53.76.24,trn
gttcgatcccgggtttcggcacca

SEQ ID NO: 4268 - DNA, 20 bp, homo sapiens
  tDNA144_AspGTC_6_-_27551236_27551307@52.71.20,trn
gttcgattccccgacgggga

SEQ ID NO: 4269 - DNA, 23 bp, homo sapiens
  tDNA144_AspGTC_6_-_27551236_27551307@52.74.23,trn
gttcgattccccgacggggagcc

SEQ ID NO: 4270 - DNA, 24 bp, homo sapiens
  tDNA144_AspGTC_6_-_27551236_27551307@52.75.24,trn
gttcgattccccgacggggagcca

SEQ ID NO: 4271 - DNA, 24 bp, homo sapiens
  tDNA92_PheGAA_1_-_149672905_149672976@52.75.24,tr
gttcgattcccggtcagggaacca

SEQ ID NO: 4272 - DNA, 24 bp, homo sapiens
  tDNA19_TyrGTA_14_-_21121258_21121351@53.76.24,trn
gttcgattccggctcgaaggacca

SEQ ID NO: 4273 - DNA, 24 bp, homo sapiens
  tDNAMT_SerTGA_MT_-_7446_7514@49.72.24,tDNAlookali
gttcgattccttccttttttgcca

SEQ ID NO: 4274 - DNA, 24 bp, homo sapiens
  tDNAMT_GlnTTG_MT_-_4329_4400@52.75.24,tDNAlookali
gttcgattctcatagtcctagcca

SEQ ID NO: 4275 - DNA, 18 bp, homo sapiens
  tDNAMT_GluTTC_MT_-_14674_14742@1.18.18,tDNAlookal
gttcttgtagttgaaata

SEQ ID NO: 4276 - DNA, 19 bp, homo sapiens
  tDNAMT_GluTTC_MT_-_14674_14742@1.19.19,tDNAlookal
gttcttgtagttgaaatac

SEQ ID NO: 4277 - DNA, 20 bp, homo sapiens
  tDNAMT_GluTTC_MT_-_14674_14742@1.20.20,tDNAlookal
gttcttgtagttgaaataca

SEQ ID NO: 4278 - DNA, 22 bp, homo sapiens
  tDNAMT_GluTTC_MT_-_14674_14742@1.22.22,tDNAlookal
gttcttgtagttgaaatacaac

SEQ ID NO: 4279 - DNA, 23 bp, homo sapiens
  tDNAMT_GluTTC_MT_-_14674_14742@1.23.23,tDNAlookal
gttcttgtagttgaaatacaacg

SEQ ID NO: 4280 - DNA, 26 bp, homo sapiens
  tDNAMT_GluTTC_MT_-_14674_14742@1.26.26,tDNAlookal
gttcttgtagttgaaatacaacgatg

SEQ ID NO: 4281 - DNA, 27 bp, homo sapiens
  tDNAMT_GluTTC_MT_-_14674_14742@1.27.27,tDNAlookal
gttcttgtagttgaaatacaacgatgg

SEQ ID NO: 4282 - DNA, 28 bp, homo sapiens
  tDNAMT_GluTTC_MT_-_14674_14742@1.28.28,tDNAlookal
gttcttgtagttgaaatacaacgatggt

SEQ ID NO: 4283 - DNA, 30 bp, homo sapiens
  tDNAMT_GluTTC_MT_-_14674_14742@1.30.30,tDNAlookal
gttcttgtagttgaaatacaacgatggttt

SEQ ID NO: 4284 - DNA, 23 bp, homo sapiens
  tDNAMT_TrpTCA_MT_+_5512_5579@49.71.23,tDNAlookali
gttgcaatacttaatttctgcca

SEQ ID NO: 4285 - DNA, 22 bp, homo sapiens
  tDNA14_TyrGTA_6_+_26569086_26569176@15.36.22,tDNA
gttggtagagcggaggactgta

SEQ ID NO: 4286 - DNA, 23 bp, homo sapiens
  tDNA14_TyrGTA_6_+_26569086_26569176@15.37.23,tDNA
gttggtagagcggaggactgtag

SEQ ID NO: 4287 - DNA, 27 bp, homo sapiens
  tDNAMT_MetCAT_MT_+_4402_4469@45.71.27
gttggttatacccttcccgtactacca

SEQ ID NO: 4288 - DNA, 23 bp, homo sapiens
  tDNAMT_GluTTC_MT_-_14674_14742@49.71.23,tDNAlooka
gttgtagtccgtgcgagaatacc

SEQ ID NO: 4289 - DNA, 24 bp, homo sapiens
  tDNAMT_GluTTC_MT_-_14674_14742@49.72.24,tDNAlooka
gttgtagtccgtgcgagaatacca

SEQ ID NO: 4290 - DNA, 23 bp, homo sapiens
  tDNAMT_AsnGTT_MT_-_5657_5729@53.75.23,tDNAlookali
gtttaagtcccattggtctagcc

SEQ ID NO: 4291 - DNA, 24 bp, homo sapiens
  tDNAMT_AsnGTT_MT_-_5657_5729@53.76.24,tDNAlookali
gtttaagtcccattggtctagcca

SEQ ID NO: 4292 - DNA, 16 bp, homo sapiens
  tDNAMT_PheGAA_MT_+_577_647@41.56.16
gtttagacgggctcac

SEQ ID NO: 4293 - DNA, 17 bp, homo sapiens
  tDNAMT_PheGAA_MT_+_577_647@41.57.17
gtttagacgggctcaca

SEQ ID NO: 4294 - DNA, 18 bp, homo sapiens
  tDNAMT_PheGAA_MT_+_577_647@41.58.18
gtttagacgggctcacat

SEQ ID NO: 4295 - DNA, 19 bp, homo sapiens
  tDNAMT_PheGAA_MT_+_577_647@41.59.19
gtttagacgggctcacatc

SEQ ID NO: 4296 - DNA, 25 bp, homo sapiens
  tDNAMT_PheGAA_MT_+_577_647@41.65.25
gtttagacgggctcacatcacccca

SEQ ID NO: 4297 - DNA, 26 bp, homo sapiens
  tDNAMT_PheGAA_MT_+_577_647@41.66.26
gtttagacgggctcacatcaccccat

SEQ ID NO: 4298 - DNA, 27 bp, homo sapiens
  tDNAMT_PheGAA_MT_+_577_647@41.67.27
gtttagacgggctcacatcaccccata

SEQ ID NO: 4299 - DNA, 28 bp, homo sapiens
  tDNAMT_PheGAA_MT_+_577_647@41.68.28
gtttagacgggctcacatcaccccataa

SEQ ID NO: 4300 - DNA, 16 bp, homo sapiens
  tDNAMT_PheGAA_MT_+_577_647@1.16.16
gtttatgtagcttacc

SEQ ID NO: 4301 - DNA, 18 bp, homo sapiens
  tDNAMT_PheGAA_MT_+_577_647@1.18.18
gtttatgtagcttacctc

SEQ ID NO: 4302 - DNA, 19 bp, homo sapiens
  tDNAMT_PheGAA_MT_+_577_647@1.19.19
gtttatgtagcttacctcc

SEQ ID NO: 4303 - DNA, 20 bp, homo sapiens
  tDNAMT_PheGAA_MT_+_577_647@1.20.20
gtttatgtagcttacctcct

SEQ ID NO: 4304 - DNA, 21 bp, homo sapiens
  tDNAMT_PheGAA_MT_+_577_647@1.21.21
gtttatgtagcttacctcctc

SEQ ID NO: 4305 - DNA, 22 bp, homo sapiens
  tDNAMT_PheGAA_MT_+_577_647@1.22.22
gtttatgtagcttacctcctca

SEQ ID NO: 4306 - DNA, 24 bp, homo sapiens
  tDNAMT_PheGAA_MT_+_577_647@1.24.24
gtttatgtagcttacctcctcaaa

SEQ ID NO: 4307 - DNA, 29 bp, homo sapiens
  tDNAMT_PheGAA_MT_+_577_647@1.29.29
gtttatgtagcttacctcctcaaagcaat

SEQ ID NO: 4308 - DNA, 20 bp, homo sapiens
  tDNA157_ValCAC_6_-_27173867_27173939@1.20.20
gtttccgtagtggagtggtt

SEQ ID NO: 4309 - DNA, 16 bp, homo sapiens
  tDNA13_ValCAC_19_-_4724647_4724719@1.16.16
gtttccgtagtgtagc

SEQ ID NO: 4310 - DNA, 17 bp, homo sapiens
  tDNA13_ValCAC_19_-_4724647_4724719@1.17.17
gtttccgtagtgtagcg

SEQ ID NO: 4311 - DNA, 18 bp, homo sapiens
  tDNA13_ValCAC_19_-_4724647_4724719@1.18.18
gtttccgtagtgtagcgg

SEQ ID NO: 4312 - DNA, 19 bp, homo sapiens
  tDNA13_ValCAC_19_-_4724647_4724719@1.19.19
gtttccgtagtgtagcggt

SEQ ID NO: 4313 - DNA, 20 bp, homo sapiens
  tDNA13_ValCAC_19_-_4724647_4724719@1.20.20
gtttccgtagtgtagcggtt

SEQ ID NO: 4314 - DNA, 22 bp, homo sapiens
  tDNA13_ValCAC_19_-_4724647_4724719@1.22.22
gtttccgtagtgtagcggttat

SEQ ID NO: 4315 - DNA, 23 bp, homo sapiens
  tDNA13_ValCAC_19_-_4724647_4724719@1.23.23
gtttccgtagtgtagcggttatc

SEQ ID NO: 4316 - DNA, 26 bp, homo sapiens
  tDNA13_ValCAC_19_-_4724647_4724719@1.26.26
gtttccgtagtgtagcggttatcaca

SEQ ID NO: 4317 - DNA, 28 bp, homo sapiens
  tDNA13_ValCAC_19_-_4724647_4724719@1.28.28
gtttccgtagtgtagcggttatcacatt

SEQ ID NO: 4318 - DNA, 30 bp, homo sapiens
  tDNA13_ValCAC_19_-_4724647_4724719@1.30.30
gtttccgtagtgtagcggttatcacattcg

SEQ ID NO: 4319 - DNA, 16 bp, homo sapiens
  tDNA37_ValAAC_6_+_27203288_27203360@1.16.16,tDNA1
gtttccgtagtgtagt

SEQ ID NO: 4320 - DNA, 17 bp, homo sapiens
  tDNA37_ValAAC_6_+_27203288_27203360@1.17.17,tDNA1
gtttccgtagtgtagtg

SEQ ID NO: 4321 - DNA, 18 bp, homo sapiens
  tDNA37_ValAAC_6_+_27203288_27203360@1.18.18,tDNA1
gtttccgtagtgtagtgg

SEQ ID NO: 4322 - DNA, 19 bp, homo sapiens
  tDNA37_ValAAC_6_+_27203288_27203360@1.19.19,tDNA1
gtttccgtagtgtagtggt

SEQ ID NO: 4323 - DNA, 20 bp, homo sapiens
  tDNA15_ValAAC_5_-_180615416_180615488@1.20.20
gtttccgtagtgtagtggtc

SEQ ID NO: 4324 - DNA, 21 bp, homo sapiens
  tDNA15_ValAAC_5_-_180615416_180615488@1.21.21
gtttccgtagtgtagtggtca

SEQ ID NO: 4325 - DNA, 22 bp, homo sapiens
  tDNA15_ValAAC_5_-_180615416_180615488@1.22.22
gtttccgtagtgtagtggtcat

SEQ ID NO: 4326 - DNA, 23 bp, homo sapiens
  tDNA15_ValAAC_5_-_180615416_180615488@1.23.23
gtttccgtagtgtagtggtcatc

SEQ ID NO: 4327 - DNA, 24 bp, homo sapiens
  tDNA15_ValAAC_5_-_180615416_180615488@1.24.24
gtttccgtagtgtagtggtcatca

SEQ ID NO: 4328 - DNA, 25 bp, homo sapiens
  tDNA15_ValAAC_5_-_180615416_180615488@1.25.25
gtttccgtagtgtagtggtcatcac

SEQ ID NO: 4329 - DNA, 26 bp, homo sapiens
  tDNA15_ValAAC_5_-_180615416_180615488@1.26.26
gtttccgtagtgtagtggtcatcacg

SEQ ID NO: 4330 - DNA, 28 bp, homo sapiens
  tDNA15_ValAAC_5_-_180615416_180615488@1.28.28
gtttccgtagtgtagtggtcatcacgtt

SEQ ID NO: 4331 - DNA, 30 bp, homo sapiens
  tDNA15_ValAAC_5_-_180615416_180615488@1.30.30
gtttccgtagtgtagtggtcatcacgttcg

SEQ ID NO: 4332 - DNA, 20 bp, homo sapiens
  tDNA37_ValAAC_6_+_27203288_27203360@1.20.20,tDNA1
gtttccgtagtgtagtggtt

SEQ ID NO: 4333 - DNA, 21 bp, homo sapiens
  tDNA37_ValAAC_6_+_27203288_27203360@1.21.21,tDNA1
gtttccgtagtgtagtggtta

SEQ ID NO: 4334 - DNA, 22 bp, homo sapiens
  tDNA37_ValAAC_6_+_27203288_27203360@1.22.22,tDNA1
gtttccgtagtgtagtggttat

SEQ ID NO: 4335 - DNA, 23 bp, homo sapiens
  tDNA37_ValAAC_6_+_27203288_27203360@1.23.23,tDNA1
gtttccgtagtgtagtggttatc

SEQ ID NO: 4336 - DNA, 24 bp, homo sapiens
  tDNA37_ValAAC_6_+_27203288_27203360@1.24.24,tDNA1
gtttccgtagtgtagtggttatca

SEQ ID NO: 4337 - DNA, 25 bp, homo sapiens
  tDNA37_ValAAC_6_+_27203288_27203360@1.25.25,tDNA1
gtttccgtagtgtagtggttatcac

SEQ ID NO: 4338 - DNA, 26 bp, homo sapiens
  tDNA37_ValAAC_6_+_27203288_27203360@1.26.26,tDNA1
gtttccgtagtgtagtggttatcacg

SEQ ID NO: 4339 - DNA, 27 bp, homo sapiens
  tDNA37_ValAAC_6_+_27203288_27203360@1.27.27,tDNA1
gtttccgtagtgtagtggttatcacgt

SEQ ID NO: 4340 - DNA, 28 bp, homo sapiens
  tDNA37_ValAAC_6_+_27203288_27203360@1.28.28,tDNA1
gtttccgtagtgtagtggttatcacgtt

SEQ ID NO: 4341 - DNA, 29 bp, homo sapiens
  tDNA136_ValAAC_6_-_27648885_27648957@1.29.29,tDNA
gtttccgtagtgtagtggttatcacgttc

SEQ ID NO: 4342 - DNA, 30 bp, homo sapiens
  tDNA136_ValAAC_6_-_27648885_27648957@1.30.30,tDNA
gtttccgtagtgtagtggttatcacgttcg

SEQ ID NO: 4343 - DNA, 23 bp, homo sapiens
  tDNA133_ValCAC_6_-_27696327_27696399@1.23.23
gtttccgtagtgtagtggttatt

SEQ ID NO: 4344 - DNA, 20 bp, homo sapiens
  tDNA40_ValTAC_6_+_27258405_27258477@1.20.20
gtttccgtggtgtagtggtt

SEQ ID NO: 4345 - DNA, 23 bp, homo sapiens
  tDNA3_GluTTC_13_-_45492062_45492133@31.53.23,tDNA
gttttcacccaggcggcccgggt

SEQ ID NO: 4346 - DNA, 18 bp, homo sapiens
  tDNAMT_AlaTGC_MT_-_5587_5655@55.72.18,tDNAlookali
gttttgcagtccttacca

SEQ ID NO: 4347 - DNA, 17 bp, homo sapiens
  tDNAMT_GluTTC_MT_-_14674_14742@27.43.17,tDNAlooka
gtttttcatatcattgg

SEQ ID NO: 4348 - DNA, 20 bp, homo sapiens
  tDNAMT_GluTTC_MT_-_14674_14742@27.46.20,tDNAlooka
gtttttcatatcattggtcg

SEQ ID NO: 4349 - DNA, 23 bp, homo sapiens
  tDNAMT_GluTTC_MT_-_14674_14742@27.49.23,tDNAlooka
gtttttcatatcattggtcgtgg

SEQ ID NO: 4350 - DNA, 30 bp, homo sapiens
  tDNAMT_GluTTC_MT_-_14674_14742@27.56.30,tDNAlooka
gtttttcatatcattggtcgtggttgtagt

SEQ ID NO: 4351 - DNA, 29 bp, homo sapiens
  tDNAMT_TyrGTA_MT_-_5826_5891@3.31.29
taaaatggctgagtgaagcattggactgt

SEQ ID NO: 4352 - DNA, 17 bp, homo sapiens
  tDNA4_ThrTGT_14_+_21149849_21149921@36.52.17,tDNA
taaaccaggggtcgcga

SEQ ID NO: 4353 - DNA, 18 bp, homo sapiens
  tDNA4_ThrTGT_14_+_21149849_21149921@36.53.18,tDNA
taaaccaggggtcgcgag

SEQ ID NO: 4354 - DNA, 19 bp, homo sapiens
  tDNA4_ThrTGT_14_+_21149849_21149921@36.54.19,tDNA
taaaccaggggtcgcgagt

SEQ ID NO: 4355 - DNA, 21 bp, homo sapiens
  tDNAMT_IleGAT_MT_+_4263_4331@52.72.21
taaacccccttatttctacca

SEQ ID NO: 4356 - DNA, 23 bp, homo sapiens
  tDNA14_ThrCGT_17_+_29877093_29877164@35.57.23
taaaccgaagatcgcgggttcga

SEQ ID NO: 4357 - DNA, 18 bp, homo sapiens
  tDNAMT_ProTGG_MT_-_15956_16023@51.68.18
taaagactttttctctga

SEQ ID NO: 4358 - DNA, 19 bp, homo sapiens
  tDNAMT_ProTGG_MT_-_15956_16023@51.69.19
taaagactttttctctgac

SEQ ID NO: 4359 - DNA, 20 bp, homo sapiens
  tDNAMT_ProTGG_MT_-_15956_16023@51.70.20
taaagactttttctctgacc

SEQ ID NO: 4360 - DNA, 21 bp, homo sapiens
  tDNAMT_ProTGG_MT_-_15956_16023@51.71.21
taaagactttttctctgacca

SEQ ID NO: 4361 - DNA, 30 bp, homo sapiens
  tDNAMT_LysTTT_MT_+_8295_8364@36.65.30,tDNAlookali
taaagattaagagaaccaacacctctttac

SEQ ID NO: 4362 - DNA, 19 bp, homo sapiens
  tDNAMT_MetCAT_MT_+_4402_4469@13.31.19
taaataagctatcgggccc

SEQ ID NO: 4363 - DNA, 20 bp, homo sapiens
  tDNAMT_MetCAT_MT_+_4402_4469@13.32.20
taaataagctatcgggccca

SEQ ID NO: 4364 - DNA, 22 bp, homo sapiens
  tDNAMT_TrpTCA_MT_+_5512_5579@13.34.22,tDNAlookali
taaatacagaccaagagccttc

SEQ ID NO: 4365 - DNA, 21 bp, homo sapiens
  tDNAMT_AspGTC_MT_+_7518_7585@51.71.21
taaatcctatatatcttacca

SEQ ID NO: 4366 - DNA, 20 bp, homo sapiens
  tDNAMT_SerGCT_MT_+_12207_12265@41.60.20
taacaacatggctttctcac

SEQ ID NO: 4367 - DNA, 21 bp, homo sapiens
  tDNAMT_SerGCT_MT_+_12207_12265@41.61.21
taacaacatggctttctcacc

SEQ ID NO: 4368 - DNA, 22 bp, homo sapiens
  tDNAMT_SerGCT_MT_+_12207_12265@41.62.22
taacaacatggctttctcacca

SEQ ID NO: 4369 - DNA, 26 bp, homo sapiens
  tDNAMT_LeuTAG_MT_+_12266_12336@13.38.26
taacagctatccattggtcttaggcc

SEQ ID NO: 4370 - DNA, 20 bp, homo sapiens
  tDNAMT_HisGTG_MT_+_12138_12206@13.32.20
taaccaaaacatcagattgt

SEQ ID NO: 4371 - DNA, 21 bp, homo sapiens
  tDNAMT_HisGTG_MT_+_12138_12206@13.33.21
taaccaaaacatcagattgtg

SEQ ID NO: 4372 - DNA, 22 bp, homo sapiens
  tDNAMT_HisGTG_MT_+_12138_12206@13.34.22
taaccaaaacatcagattgtga

SEQ ID NO: 4373 - DNA, 24 bp, homo sapiens
  tDNAMT_HisGTG_MT_+_12138_12206@13.36.24
taaccaaaacatcagattgtgaat

SEQ ID NO: 4374 - DNA, 25 bp, homo sapiens
  tDNAMT_HisGTG_MT_+_12138_12206@13.37.25
taaccaaaacatcagattgtgaatc

SEQ ID NO: 4375 - DNA, 26 bp, homo sapiens
  tDNAMT_HisGTG_MT_+_12138_12206@13.38.26
taaccaaaacatcagattgtgaatct

SEQ ID NO: 4376 - DNA, 29 bp, homo sapiens
  tDNAMT_HisGTG_MT_+_12138_12206@13.41.29
taaccaaaacatcagattgtgaatctgac

SEQ ID NO: 4377 - DNA, 17 bp, homo sapiens
  tDNA61_MetCAT_6_+_27745664_27745735@35.51.17,tDNA
taacccagaggtcgatg

SEQ ID NO: 4378 - DNA, 18 bp, homo sapiens
  tDNA61_MetCAT_6_+_27745664_27745735@35.52.18,tDNA
taacccagaggtcgatgg

SEQ ID NO: 4379 - DNA, 19 bp, homo sapiens
  tDNA61_MetCAT_6_+_27745664_27745735@35.53.19,tDNA
taacccagaggtcgatgga

SEQ ID NO: 4380 - DNA, 20 bp, homo sapiens
  tDNA61_MetCAT_6_+_27745664_27745735@35.54.20,tDNA
taacccagaggtcgatggat

SEQ ID NO: 4381 - DNA, 21 bp, homo sapiens
  tDNA61_MetCAT_6_+_27745664_27745735@35.55.21,tDNA
taacccagaggtcgatggatc

SEQ ID NO: 4382 - DNA, 22 bp, homo sapiens
  tDNA32_MetCAT_1_+_153643726_153643797@35.56.22,tr
taacccagaggtcgatggatcg

SEQ ID NO: 4383 - DNA, 23 bp, homo sapiens
  tDNA32_MetCAT_1_+_153643726_153643797@35.57.23,tr
taacccagaggtcgatggatcga

SEQ ID NO: 4384 - DNA, 24 bp, homo sapiens
  tDNA32_MetCAT_1_+_153643726_153643797@35.58.24,tr
taacccagaggtcgatggatcgaa

SEQ ID NO: 4385 - DNA, 25 bp, homo sapiens
  tDNA32_MetCAT_1_+_153643726_153643797@35.59.25,tr
taacccagaggtcgatggatcgaaa

SEQ ID NO: 4386 - DNA, 23 bp, homo sapiens
  tDNA103_AsnGTT_1_-_149230570_149230643@37.59.23,t
taaccgaaaggttggtggttcga

SEQ ID NO: 4387 - DNA, 22 bp, homo sapiens
  tDNA57_IleAAT_6_+_27636362_27636435@37.58.22,tDNA
taacgccaaggtcgcgggttcg

SEQ ID NO: 4388 - DNA, 23 bp, homo sapiens
  tDNA57_IleAAT_6_+_27636362_27636435@37.59.23,tDNA
taacgccaaggtcgcgggttcga

SEQ ID NO: 4389 - DNA, 24 bp, homo sapiens
  tDNA57_IleAAT_6_+_27636362_27636435@37.60.24,tDNA
taacgccaaggtcgcgggttcgat

SEQ ID NO: 4390 - DNA, 25 bp, homo sapiens
  tDNA57_IleAAT_6_+_27636362_27636435@37.61.25,tDNA
taacgccaaggtcgcgggttcgatc

SEQ ID NO: 4391 - DNA, 16 bp, homo sapiens
  tDNAMT_ValTAC_MT_+_1602_1670@53.68.16
taacttgaccgctctg

SEQ ID NO: 4392 - DNA, 17 bp, homo sapiens
  tDNAMT_ValTAC_MT_+_1602_1670@53.69.17
taacttgaccgctctga

SEQ ID NO: 4393 - DNA, 18 bp, homo sapiens
  tDNAMT_ValTAC_MT_+_1602_1670@53.70.18
taacttgaccgctctgac

SEQ ID NO: 4394 - DNA, 19 bp, homo sapiens
  tDNAMT_ValTAC_MT_+_1602_1670@53.71.19
taacttgaccgctctgacc

SEQ ID NO: 4395 - DNA, 20 bp, homo sapiens
  tDNAMT_ValTAC_MT_+_1602_1670@53.72.20
taacttgaccgctctgacca

SEQ ID NO: 4396 - DNA, 30 bp, homo sapiens
  tDNAMT_LysTTT_MT_+_8295_8364@43.72.30,tDNAlookali
taagagaaccaacacctctttacagtgacc

SEQ ID NO: 4397 - DNA, 17 bp, homo sapiens
  tDNA12_ArgCCT_16_+_3243918_3243990@36.52.17,tDNA3
taagccagggattgtgg

SEQ ID NO: 4398 - DNA, 18 bp, homo sapiens
  tDNA12_ArgCCT_16_+_3243918_3243990@36.53.18,tDNA3
taagccagggattgtggg

SEQ ID NO: 4399 - DNA, 19 bp, homo sapiens
  tDNA12_ArgCCT_16_+_3243918_3243990@36.54.19,tDNA3
taagccagggattgtgggt

SEQ ID NO: 4400 - DNA, 22 bp, homo sapiens
  tDNA12_ArgCCT_16_+_3243918_3243990@36.57.22,tDNA3
taagccagggattgtgggttcg

SEQ ID NO: 4401 - DNA, 23 bp, homo sapiens
  tDNA12_ArgCCT_16_+_3243918_3243990@36.58.23,tDNA3
taagccagggattgtgggttcga

SEQ ID NO: 4402 - DNA, 21 bp, homo sapiens
  tDNAMT_AsnGTT_MT_-_5657_5729@56.76.21,tDNAlookali
taagtcccattggtctagcca

SEQ ID NO: 4403 - DNA, 17 bp, homo sapiens
  tDNAMT_IleGAT_MT_+_4263_4331@41.57.17
taataggagcttaaacc

SEQ ID NO: 4404 - DNA, 19 bp, homo sapiens
  tDNAMT_ArgTCG_MT_+_10405_10469@50.68.19
taatcatatttaccaacca

SEQ ID NO: 4405 - DNA, 19 bp, homo sapiens
  tDNA21_MetCAT_6_+_26701712_26701784@36.54.19,tDNA
taatctgaaggtcctgagt

SEQ ID NO: 4406 - DNA, 22 bp, homo sapiens
  tDNA22_GlnCTG_1_+_147800937_147801008@13.34.22,tr
taatggtaagcactctggactc

SEQ ID NO: 4407 - DNA, 18 bp, homo sapiens
  tDNA15_GlnCTG_1_+_145963304_145963375@13.30.18,tr
taatggtgagcactctgg

SEQ ID NO: 4408 - DNA, 19 bp, homo sapiens
  tDNA15_GlnCTG_1_+_145963304_145963375@13.31.19,tr
taatggtgagcactctgga

SEQ ID NO: 4409 - DNA, 21 bp, homo sapiens
  tDNA15_GlnCTG_1_+_145963304_145963375@13.33.21,tr
taatggtgagcactctggact

SEQ ID NO: 4410 - DNA, 22 bp, homo sapiens
  tDNA15_GlnCTG_1_+_145963304_145963375@13.34.22,tr
taatggtgagcactctggactc

SEQ ID NO: 4411 - DNA, 19 bp, homo sapiens
  tDNAMT_ProTGG_MT_-_15956_16023@39.57.19
taatggtggagttaaagac

SEQ ID NO: 4412 - DNA, 29 bp, homo sapiens
  tDNAMT_ProTGG_MT_-_15956_16023@39.67.29
taatggtggagttaaagactttttctctg

SEQ ID NO: 4413 - DNA, 17 bp, homo sapiens
  tDNA42_GlnCTG_6_+_27263212_27263283@13.29.17,tDNA
taatggttagcactctg

SEQ ID NO: 4414 - DNA, 18 bp, homo sapiens
  tDNA42_GlnCTG_6_+_27263212_27263283@13.30.18,tDNA
taatggttagcactctgg

SEQ ID NO: 4415 - DNA, 19 bp, homo sapiens
  tDNA42_GlnCTG_6_+_27263212_27263283@13.31.19,tDNA
taatggttagcactctgga

SEQ ID NO: 4416 - DNA, 20 bp, homo sapiens
  tDNA42_GlnCTG_6_+_27263212_27263283@13.32.20,tDNA
taatggttagcactctggac

SEQ ID NO: 4417 - DNA, 21 bp, homo sapiens
  tDNA42_GlnCTG_6_+_27263212_27263283@13.33.21,tDNA
taatggttagcactctggact

SEQ ID NO: 4418 - DNA, 22 bp, homo sapiens
  tDNA42_GlnCTG_6_+_27263212_27263283@13.34.22,tDNA
taatggttagcactctggactc

SEQ ID NO: 4419 - DNA, 23 bp, homo sapiens
  tDNA42_GlnCTG_6_+_27263212_27263283@13.35.23,tDNA
taatggttagcactctggactct

SEQ ID NO: 4420 - DNA, 24 bp, homo sapiens
  tDNA42_GlnCTG_6_+_27263212_27263283@13.36.24,tDNA
taatggttagcactctggactctg

SEQ ID NO: 4421 - DNA, 25 bp, homo sapiens
  tDNA42_GlnCTG_6_+_27263212_27263283@13.37.25,tDNA
taatggttagcactctggactctga

SEQ ID NO: 4422 - DNA, 26 bp, homo sapiens
  tDNA42_GlnCTG_6_+_27263212_27263283@13.38.26,tDNA
taatggttagcactctggactctgaa

SEQ ID NO: 4423 - DNA, 24 bp, homo sapiens
  tDNA130_GlnTTG_6_-_27763640_27763711@13.36.24,trn
taatggttagcactctggactttg

SEQ ID NO: 4424 - DNA, 25 bp, homo sapiens
  tDNA130_GlnTTG_6_-_27763640_27763711@13.37.25,trn
taatggttagcactctggactttga

SEQ ID NO: 4425 - DNA, 30 bp, homo sapiens
  tDNAMT_ValTAC_MT_+_1602_1670@32.61.30
tacacttaggagatttcaacttaacttgac

SEQ ID NO: 4426 - DNA, 18 bp, homo sapiens
  tDNAMT_MetCAT_MT_+_4402_4469@53.70.18
tacccttcccgtactacc

SEQ ID NO: 4427 - DNA, 19 bp, homo sapiens
  tDNAMT_MetCAT_MT_+_4402_4469@53.71.19
tacccttcccgtactacca

SEQ ID NO: 4428 - DNA, 20 bp, homo sapiens
  tDNAMT_HisGTG_MT_+_12138_12206@52.71.20
tacgaccccttatttacccc

SEQ ID NO: 4429 - DNA, 21 bp, homo sapiens
  tDNAMT_HisGTG_MT_+_12138_12206@52.72.21
tacgaccccttatttacccca

SEQ ID NO: 4430 - DNA, 16 bp, homo sapiens
  tDNAMT_TrpTCA_MT_+_5512_5579@56.71.16,tDNAlookali
tacttaatttctgcca

SEQ ID NO: 4431 - DNA, 16 bp, homo sapiens
  tDNA18_GlyGCC_16_+_70822597_70822667@19.34.16,trn
tagaattctcgcctgc

SEQ ID NO: 4432 - DNA, 17 bp, homo sapiens
  tDNA18_GlyGCC_16_+_70822597_70822667@19.35.17,trn
tagaattctcgcctgcc

SEQ ID NO: 4433 - DNA, 19 bp, homo sapiens
  tDNA25_GlyGCC_16_-_70812114_70812184@19.37.19,trn
tagaattctcgcctgccac

SEQ ID NO: 4434 - DNA, 20 bp, homo sapiens
  tDNA25_GlyGCC_16_-_70812114_70812184@19.38.20,trn
tagaattctcgcctgccacg

SEQ ID NO: 4435 - DNA, 21 bp, homo sapiens
  tDNA25_GlyGCC_16_-_70812114_70812184@19.39.21,trn
tagaattctcgcctgccacgc

SEQ ID NO: 4436 - DNA, 22 bp, homo sapiens
  tDNA25_GlyGCC_16_-_70812114_70812184@19.40.22,trn
tagaattctcgcctgccacgcg

SEQ ID NO: 4437 - DNA, 18 bp, homo sapiens
  tDNA19_TyrGTA_14_-_21121258_21121351@20.37.18,trn
tagagcggaggactgtag

SEQ ID NO: 4438 - DNA, 16 bp, homo sapiens
  tDNAMT_AsnGTT_MT_-_5657_5729@1.16.16,tDNAlookalik
tagattgaagccagtt

SEQ ID NO: 4439 - DNA, 18 bp, homo sapiens
  tDNAMT_AsnGTT_MT_-_5657_5729@1.18.18,tDNAlookalik
tagattgaagccagttga

SEQ ID NO: 4440 - DNA, 22 bp, homo sapiens
  tDNAMT_AsnGTT_MT_-_5657_5729@1.22.22,tDNAlookalik
tagattgaagccagttgattag

SEQ ID NO: 4441 - DNA, 23 bp, homo sapiens
  tDNAMT_AsnGTT_MT_-_5657_5729@1.23.23,tDNAlookalik
tagattgaagccagttgattagg

SEQ ID NO: 4442 - DNA, 24 bp, homo sapiens
  tDNAMT_AsnGTT_MT_-_5657_5729@1.24.24,tDNAlookalik
tagattgaagccagttgattaggg

SEQ ID NO: 4443 - DNA, 25 bp, homo sapiens
  tDNAMT_AsnGTT_MT_-_5657_5729@1.25.25,tDNAlookalik
tagattgaagccagttgattagggt

SEQ ID NO: 4444 - DNA, 29 bp, homo sapiens
  tDNAMT_AsnGTT_MT_-_5657_5729@1.29.29,tDNAlookalik
tagattgaagccagttgattagggtgctt

SEQ ID NO: 4445 - DNA, 17 bp, homo sapiens
  tDNA42_GlnCTG_6_+_27263212_27263283@20.36.17,tDNA
tagcactctggactctg

SEQ ID NO: 4446 - DNA, 18 bp, homo sapiens
  tDNA42_GlnCTG_6_+_27263212_27263283@20.37.18,tDNA
tagcactctggactctga

SEQ ID NO: 4447 - DNA, 19 bp, homo sapiens
  tDNA42_GlnCTG_6_+_27263212_27263283@20.38.19,tDNA
tagcactctggactctgaa

SEQ ID NO: 4448 - DNA, 20 bp, homo sapiens
  tDNA42_GlnCTG_6_+_27263212_27263283@20.39.20,tDNA
tagcactctggactctgaat

SEQ ID NO: 4449 - DNA, 21 bp, homo sapiens
  tDNA42_GlnCTG_6_+_27263212_27263283@20.40.21,tDNA
tagcactctggactctgaatc

SEQ ID NO: 4450 - DNA, 22 bp, homo sapiens
  tDNA42_GlnCTG_6_+_27263212_27263283@20.41.22,tDNA
tagcactctggactctgaatcc

SEQ ID NO: 4451 - DNA, 23 bp, homo sapiens
  tDNA146_GlnCTG_6_-_27515531_27515602@20.42.23,trn
tagcactctggactctgaatcca

SEQ ID NO: 4452 - DNA, 24 bp, homo sapiens
  tDNA146_GlnCTG_6_-_27515531_27515602@20.43.24,trn
tagcactctggactctgaatccag

SEQ ID NO: 4453 - DNA, 25 bp, homo sapiens
  tDNA146_GlnCTG_6_-_27515531_27515602@20.44.25,trn
tagcactctggactctgaatccagc

SEQ ID NO: 4454 - DNA, 26 bp, homo sapiens
  tDNA146_GlnCTG_6_-_27515531_27515602@20.45.26,trn
tagcactctggactctgaatccagcg

SEQ ID NO: 4455 - DNA, 17 bp, homo sapiens
  tDNA130_GlnTTG_6_-_27763640_27763711@20.36.17,trn
tagcactctggactttg

SEQ ID NO: 4456 - DNA, 18 bp, homo sapiens
  tDNA130_GlnTTG_6_-_27763640_27763711@20.37.18,trn
tagcactctggactttga

SEQ ID NO: 4457 - DNA, 19 bp, homo sapiens
  tDNA130_GlnTTG_6_-_27763640_27763711@20.38.19,trn
tagcactctggactttgaa

SEQ ID NO: 4458 - DNA, 20 bp, homo sapiens
  tDNA130_GlnTTG_6_-_27763640_27763711@20.39.20,trn
tagcactctggactttgaat

SEQ ID NO: 4459 - DNA, 21 bp, homo sapiens
  tDNA130_GlnTTG_6_-_27763640_27763711@20.40.21,trn
tagcactctggactttgaatc

SEQ ID NO: 4460 - DNA, 22 bp, homo sapiens
  tDNA130_GlnTTG_6_-_27763640_27763711@20.41.22,trn
tagcactctggactttgaatcc

SEQ ID NO: 4461 - DNA, 23 bp, homo sapiens
  tDNA130_GlnTTG_6_-_27763640_27763711@20.42.23,trn
tagcactctggactttgaatcca

SEQ ID NO: 4462 - DNA, 25 bp, homo sapiens
  tDNA130_GlnTTG_6_-_27763640_27763711@20.44.25,trn
tagcactctggactttgaatccagc

SEQ ID NO: 4463 - DNA, 19 bp, homo sapiens
  tDNA125_AsnGTT_1_-_143663558_143663631@21.39.19,t
tagcgcgttcggctgttaa

SEQ ID NO: 4464 - DNA, 20 bp, homo sapiens
  tDNA135_AsnGTT_1_-_16858893_16858966@21.40.20,trn
tagcgcgttcggctgttaac

SEQ ID NO: 4465 - DNA, 21 bp, homo sapiens
  tDNA135_AsnGTT_1_-_16858893_16858966@21.41.21,trn
tagcgcgttcggctgttaacc

SEQ ID NO: 4466 - DNA, 22 bp, homo sapiens
  tDNA101_AsnGTT_1_-_149284503_149284576@21.42.22,t
tagcgcgttcggctgttaaccg

SEQ ID NO: 4467 - DNA, 23 bp, homo sapiens
  tDNA25_AsnGTT_1_+_148000805_148000878@21.43.23,tr
tagcgcgttcggctgttaaccga

SEQ ID NO: 4468 - DNA, 19 bp, homo sapiens
  tDNA3_GluTTC_13_-_45492062_45492133@13.31.19,tDNA
tagcggttaggattcctgg

SEQ ID NO: 4469 - DNA, 22 bp, homo sapiens
  tDNA78_LeuAAG_6_+_28956779_28956860@3.24.22,tDNA1
tagcgtggccgagcggtctaag

SEQ ID NO: 4470 - DNA, 23 bp, homo sapiens
  tDNA78_LeuAAG_6_+_28956779_28956860@3.25.23,tDNA1
tagcgtggccgagcggtctaagg

SEQ ID NO: 4471 - DNA, 29 bp, homo sapiens
  tDNA78_LeuAAG_6_+_28956779_28956860@3.31.29,tDNA1
tagcgtggccgagcggtctaaggcgctgg

SEQ ID NO: 4472 - DNA, 17 bp, homo sapiens
  tDNA118_LysTTT_6_-_28660987_28661060@8.24.17,tDNA
tagctcagtcggtagag

SEQ ID NO: 4473 - DNA, 29 bp, homo sapiens
  tDNA149_LysTTT_6_-_27302769_27302841@8.36.29,tDNA
tagctcagtcggtagagcatcagactttt

SEQ ID NO: 4474 - DNA, 25 bp, homo sapiens
  tDNA7_CysGCA_3_-_131947944_131948015@8.32.25,tDNA
tagctcagtggtagagcatttgact

SEQ ID NO: 4475 - DNA, 27 bp, homo sapiens
  tDNA7_CysGCA_3_-_131947944_131948015@8.34.27,tDNA
tagctcagtggtagagcatttgactgc

SEQ ID NO: 4476 - DNA, 25 bp, homo sapiens
  tDNAMT_ValTAC_MT_+_1602_1670@38.62.25
taggagatttcaacttaacttgacc

SEQ ID NO: 4477 - DNA, 26 bp, homo sapiens
  tDNAMT_ValTAC_MT_+_1602_1670@38.63.26
taggagatttcaacttaacttgaccg

SEQ ID NO: 4478 - DNA, 28 bp, homo sapiens
  tDNAMT_ValTAC_MT_+_1602_1670@38.65.28
taggagatttcaacttaacttgaccgct

SEQ ID NO: 4479 - DNA, 29 bp, homo sapiens
  tDNAMT_ValTAC_MT_+_1602_1670@38.66.29
taggagatttcaacttaacttgaccgctc

SEQ ID NO: 4480 - DNA, 30 bp, homo sapiens
  tDNAMT_ValTAC_MT_+_1602_1670@38.67.30
taggagatttcaacttaacttgaccgctct

SEQ ID NO: 4481 - DNA, 18 bp, homo sapiens
  tDNAMT_GlnTTG_MT_-_4329_4400@1.18.18,tDNAlookalik
taggatggggtgtgatag

SEQ ID NO: 4482 - DNA, 19 bp, homo sapiens
  tDNAMT_GlnTTG_MT_-_4329_4400@1.19.19,tDNAlookalik
taggatggggtgtgatagg

SEQ ID NO: 4483 - DNA, 20 bp, homo sapiens
  tDNAMT_GlnTTG_MT_-_4329_4400@1.20.20,tDNAlookalik
taggatggggtgtgataggt

SEQ ID NO: 4484 - DNA, 21 bp, homo sapiens
  tDNAMT_GlnTTG_MT_-_4329_4400@1.21.21,tDNAlookalik
taggatggggtgtgataggtg

SEQ ID NO: 4485 - DNA, 22 bp, homo sapiens
  tDNAMT_GlnTTG_MT_-_4329_4400@1.22.22,tDNAlookalik
taggatggggtgtgataggtgg

SEQ ID NO: 4486 - DNA, 23 bp, homo sapiens
  tDNAMT_GlnTTG_MT_-_4329_4400@1.23.23,tDNAlookalik
taggatggggtgtgataggtggc

SEQ ID NO: 4487 - DNA, 24 bp, homo sapiens
  tDNAMT_GlnTTG_MT_-_4329_4400@1.24.24,tDNAlookalik
taggatggggtgtgataggtggca

SEQ ID NO: 4488 - DNA, 26 bp, homo sapiens
  tDNAMT_GlnTTG_MT_-_4329_4400@1.26.26,tDNAlookalik
taggatggggtgtgataggtggcacg

SEQ ID NO: 4489 - DNA, 27 bp, homo sapiens
  tDNAMT_GlnTTG_MT_-_4329_4400@1.27.27,tDNAlookalik
taggatggggtgtgataggtggcacgg

SEQ ID NO: 4490 - DNA, 28 bp, homo sapiens
  tDNAMT_GlnTTG_MT_-_4329_4400@1.28.28,tDNAlookalik
taggatggggtgtgataggtggcacgga

SEQ ID NO: 4491 - DNA, 29 bp, homo sapiens
  tDNAMT_GlnTTG_MT_-_4329_4400@1.29.29,tDNAlookalik
taggatggggtgtgataggtggcacggag

SEQ ID NO: 4492 - DNA, 20 bp, homo sapiens
  tDNA10_GluCTC_3_-_103879524_103879595@20.39.20,tr
taggattcggcgctctcacc

SEQ ID NO: 4493 - DNA, 22 bp, homo sapiens
  tDNA10_GluCTC_3_-_103879524_103879595@20.41.22,tr
taggattcggcgctctcaccgc

SEQ ID NO: 4494 - DNA, 20 bp, homo sapiens
  tDNAMT_TyrGTA_MT_-_5826_5891@50.69.20
taggcctctttttaccacca

SEQ ID NO: 4495 - DNA, 18 bp, homo sapiens
  tDNA12_ProTGG_11_-_75946869_75946940@13.30.18
taggggtatgattctcgg

SEQ ID NO: 4496 - DNA, 19 bp, homo sapiens
  tDNA12_ProTGG_11_-_75946869_75946940@13.31.19
taggggtatgattctcggt

SEQ ID NO: 4497 - DNA, 18 bp, homo sapiens
  tDNA111_HisGTG_1_-_147774845_147774916@20.37.18,t
tagtactctgcgttgtgg

SEQ ID NO: 4498 - DNA, 19 bp, homo sapiens
  tDNA111_HisGTG_1_-_147774845_147774916@20.38.19,t
tagtactctgcgttgtggc

SEQ ID NO: 4499 - DNA, 20 bp, homo sapiens
  tDNA111_HisGTG_1_-_147774845_147774916@20.39.20,t
tagtactctgcgttgtggcc

SEQ ID NO: 4500 - DNA, 21 bp, homo sapiens
  tDNA111_HisGTG_1_-_147774845_147774916@20.40.21,t
tagtactctgcgttgtggccg

SEQ ID NO: 4501 - DNA, 22 bp, homo sapiens
  tDNA111_HisGTG_1_-_147774845_147774916@20.41.22,t
tagtactctgcgttgtggccgc

SEQ ID NO: 4502 - DNA, 23 bp, homo sapiens
  tDNA111_HisGTG_1_-_147774845_147774916@20.42.23,t
tagtactctgcgttgtggccgca

SEQ ID NO: 4503 - DNA, 20 bp, homo sapiens
  tDNAMT_GluTTC_MT_-_14674_14742@53.72.20,tDNAlooka
tagtccgtgcgagaatacca

SEQ ID NO: 4504 - DNA, 23 bp, homo sapiens
  tDNA145_SerAGA_6_-_27521192_27521273@2.24.23,tDNA
tagtcgtggccgagtggttaagg

SEQ ID NO: 4505 - DNA, 19 bp, homo sapiens
  tDNA102_GluTTC_1_-_149278785_149278857@13.31.19,t
tagtggctaggattcggcg

SEQ ID NO: 4506 - DNA, 19 bp, homo sapiens
  tDNA22_AspGTC_5_-_141773988_141774059@13.31.19,tr
tagtggtgagtatccccgc

SEQ ID NO: 4507 - DNA, 18 bp, homo sapiens
  tDNA25_GluCTC_2_-_71273488_71273560@13.30.18,tDNA
tagtggttaggattcggc

SEQ ID NO: 4508 - DNA, 19 bp, homo sapiens
  tDNA25_GluCTC_2_-_71273488_71273560@13.31.19,tDNA
tagtggttaggattcggcg

SEQ ID NO: 4509 - DNA, 20 bp, homo sapiens
  tDNA25_GluCTC_2_-_71273488_71273560@13.32.20,tDNA
tagtggttaggattcggcgc

SEQ ID NO: 4510 - DNA, 21 bp, homo sapiens
  tDNA25_GluCTC_2_-_71273488_71273560@13.33.21,tDNA
tagtggttaggattcggcgct

SEQ ID NO: 4511 - DNA, 22 bp, homo sapiens
  tDNA25_GluCTC_2_-_71273488_71273560@13.34.22,tDNA
tagtggttaggattcggcgctc

SEQ ID NO: 4512 - DNA, 23 bp, homo sapiens
  tDNA25_GluCTC_2_-_71273488_71273560@13.35.23,tDNA
tagtggttaggattcggcgctct

SEQ ID NO: 4513 - DNA, 24 bp, homo sapiens
  tDNA25_GluCTC_2_-_71273488_71273560@13.36.24,tDNA
tagtggttaggattcggcgctctc

SEQ ID NO: 4514 - DNA, 25 bp, homo sapiens
  tDNA25_GluCTC_2_-_71273488_71273560@13.37.25,tDNA
tagtggttaggattcggcgctctca

SEQ ID NO: 4515 - DNA, 26 bp, homo sapiens
  tDNA59_GluCTC_1_+_249168447_249168518@13.38.26,tr
tagtggttaggattcggcgctctcac

SEQ ID NO: 4516 - DNA, 27 bp, homo sapiens
  tDNA59_GluCTC_1_+_249168447_249168518@13.39.27,tr
tagtggttaggattcggcgctctcacc

SEQ ID NO: 4517 - DNA, 30 bp, homo sapiens
  tDNA59_GluCTC_1_+_249168447_249168518@13.42.30,tr
tagtggttaggattcggcgctctcaccgcc

SEQ ID NO: 4518 - DNA, 18 bp, homo sapiens
  tDNA106_HisGTG_1_-_149155828_149155899@13.30.18,t
tagtggttagtactctgc

SEQ ID NO: 4519 - DNA, 19 bp, homo sapiens
  tDNA106_HisGTG_1_-_149155828_149155899@13.31.19,t
tagtggttagtactctgcg

SEQ ID NO: 4520 - DNA, 20 bp, homo sapiens
  tDNA111_HisGTG_1_-_147774845_147774916@13.32.20,t
tagtggttagtactctgcgt

SEQ ID NO: 4521 - DNA, 21 bp, homo sapiens
  tDNA111_HisGTG_1_-_147774845_147774916@13.33.21,t
tagtggttagtactctgcgtt

SEQ ID NO: 4522 - DNA, 22 bp, homo sapiens
  tDNA111_HisGTG_1_-_147774845_147774916@13.34.22,t
tagtggttagtactctgcgttg

SEQ ID NO: 4523 - DNA, 23 bp, homo sapiens
  tDNA111_HisGTG_1_-_147774845_147774916@13.35.23,t
tagtggttagtactctgcgttgt

SEQ ID NO: 4524 - DNA, 25 bp, homo sapiens
  tDNA111_HisGTG_1_-_147774845_147774916@13.37.25,t
tagtggttagtactctgcgttgtgg

SEQ ID NO: 4525 - DNA, 26 bp, homo sapiens
  tDNA111_HisGTG_1_-_147774845_147774916@13.38.26,t
tagtggttagtactctgcgttgtggc

SEQ ID NO: 4526 - DNA, 27 bp, homo sapiens
  tDNA111_HisGTG_1_-_147774845_147774916@13.39.27,t
tagtggttagtactctgcgttgtggcc

SEQ ID NO: 4527 - DNA, 25 bp, homo sapiens
  tDNA136_ValAAC_6_-_27648885_27648957@8.32.25,tDNA
tagtgtagtggttatcacgttcgcc

SEQ ID NO: 4528 - DNA, 20 bp, homo sapiens
  tDNAMT_MetCAT_MT_+_4402_4469@51.70.20
tatacccttcccgtactacc

SEQ ID NO: 4529 - DNA, 21 bp, homo sapiens
  tDNAMT_MetCAT_MT_+_4402_4469@51.71.21
tatacccttcccgtactacca

SEQ ID NO: 4530 - DNA, 27 bp, homo sapiens
  tDNA28_CysGCA_17_-_37025545_37025616@6.32.27,tDNA
tatagctcagtggtagagcatttgact

SEQ ID NO: 4531 - DNA, 20 bp, homo sapiens
  tDNA106_HisGTG_1_-_149155828_149155899@11.30.20,t
tatagtggttagtactctgc

SEQ ID NO: 4532 - DNA, 21 bp, homo sapiens
  tDNA106_HisGTG_1_-_149155828_149155899@11.31.21,t
tatagtggttagtactctgcg

SEQ ID NO: 4533 - DNA, 22 bp, homo sapiens
  tDNA111_HisGTG_1_-_147774845_147774916@11.32.22,t
tatagtggttagtactctgcgt

SEQ ID NO: 4534 - DNA, 23 bp, homo sapiens
  tDNA111_HisGTG_1_-_147774845_147774916@11.33.23,t
tatagtggttagtactctgcgtt

SEQ ID NO: 4535 - DNA, 24 bp, homo sapiens
  tDNA111_HisGTG_1_-_147774845_147774916@11.34.24,t
tatagtggttagtactctgcgttg

SEQ ID NO: 4536 - DNA, 25 bp, homo sapiens
  tDNA111_HisGTG_1_-_147774845_147774916@11.35.25,t
tatagtggttagtactctgcgttgt

SEQ ID NO: 4537 - DNA, 20 bp, homo sapiens
  tDNAMT_GluTTC_MT_-_14674_14742@35.54.20,tDNAlooka
tatcattggtcgtggttgta

SEQ ID NO: 4538 - DNA, 21 bp, homo sapiens
  tDNAMT_GluTTC_MT_-_14674_14742@35.55.21,tDNAlooka
tatcattggtcgtggttgtag

SEQ ID NO: 4539 - DNA, 22 bp, homo sapiens
  tDNAMT_GluTTC_MT_-_14674_14742@35.56.22,tDNAlooka
tatcattggtcgtggttgtagt

SEQ ID NO: 4540 - DNA, 23 bp, homo sapiens
  tDNAMT_GluTTC_MT_-_14674_14742@35.57.23,tDNAlooka
tatcattggtcgtggttgtagtc

SEQ ID NO: 4541 - DNA, 24 bp, homo sapiens
  tDNAMT_GluTTC_MT_-_14674_14742@35.58.24,tDNAlooka
tatcattggtcgtggttgtagtcc

SEQ ID NO: 4542 - DNA, 25 bp, homo sapiens
  tDNAMT_GluTTC_MT_-_14674_14742@35.59.25,tDNAlooka
tatcattggtcgtggttgtagtccg

SEQ ID NO: 4543 - DNA, 26 bp, homo sapiens
  tDNAMT_GluTTC_MT_-_14674_14742@35.60.26,tDNAlooka
tatcattggtcgtggttgtagtccgt

SEQ ID NO: 4544 - DNA, 27 bp, homo sapiens
  tDNAMT_GluTTC_MT_-_14674_14742@35.61.27,tDNAlooka
tatcattggtcgtggttgtagtccgtg

SEQ ID NO: 4545 - DNA, 28 bp, homo sapiens
  tDNAMT_GluTTC_MT_-_14674_14742@35.62.28,tDNAlooka
tatcattggtcgtggttgtagtccgtgc

SEQ ID NO: 4546 - DNA, 29 bp, homo sapiens
  tDNAMT_GluTTC_MT_-_14674_14742@35.63.29,tDNAlooka
tatcattggtcgtggttgtagtccgtgcg

SEQ ID NO: 4547 - DNA, 19 bp, homo sapiens
  tDNAMT_LeuTAG_MT_+_12266_12336@20.38.19
tatccattggtcttaggcc

SEQ ID NO: 4548 - DNA, 20 bp, homo sapiens
  tDNAMT_LeuTAG_MT_+_12266_12336@20.39.20
tatccattggtcttaggccc

SEQ ID NO: 4549 - DNA, 21 bp, homo sapiens
  tDNAMT_LeuTAG_MT_+_12266_12336@20.40.21
tatccattggtcttaggcccc

SEQ ID NO: 4550 - DNA, 28 bp, homo sapiens
  tDNA69_AspGTC_1_-_161440205_161440276@23.50.28,tr
tatccccgcctgtcacgcgggagaccgg

SEQ ID NO: 4551 - DNA, 19 bp, homo sapiens
  tDNAMT_ArgTCG_MT_+_10405_10469@45.63.19
tatgataatcatatttacc

SEQ ID NO: 4552 - DNA, 22 bp, homo sapiens
  tDNAMT_ArgTCG_MT_+_10405_10469@45.66.22
tatgataatcatatttaccaac

SEQ ID NO: 4553 - DNA, 23 bp, homo sapiens
  tDNAMT_ArgTCG_MT_+_10405_10469@45.67.23
tatgataatcatatttaccaacc

SEQ ID NO: 4554 - DNA, 24 bp, homo sapiens
  tDNAMT_ArgTCG_MT_+_10405_10469@45.68.24
tatgataatcatatttaccaacca

SEQ ID NO: 4555 - DNA, 22 bp, homo sapiens
  tDNA30_ProCGG_6_+_27059521_27059592@19.40.22
tatgattctcgcttcgggtgtg

SEQ ID NO: 4556 - DNA, 17 bp, homo sapiens
  tDNA12_ProTGG_11_-_75946869_75946940@19.35.17
tatgattctcggtttgg

SEQ ID NO: 4557 - DNA, 25 bp, homo sapiens
  tDNA5_GluTTC_13_-_41634874_41634945@6.30.25,tDNA2
tatggtctagcggttaggattcctg

SEQ ID NO: 4558 - DNA, 26 bp, homo sapiens
  tDNA5_GluTTC_13_-_41634874_41634945@6.31.26,tDNA2
tatggtctagcggttaggattcctgg

SEQ ID NO: 4559 - DNA, 19 bp, homo sapiens
  tDNAMT_CysGCA_MT_-_5761_5826@49.67.19
tcaaacctgccggggcttc

SEQ ID NO: 4560 - DNA, 20 bp, homo sapiens
  tDNAMT_CysGCA_MT_-_5761_5826@49.68.20
tcaaacctgccggggcttcc

SEQ ID NO: 4561 - DNA, 21 bp, homo sapiens
  tDNAMT_CysGCA_MT_-_5761_5826@49.69.21
tcaaacctgccggggcttcca

SEQ ID NO: 4562 - DNA, 29 bp, homo sapiens
  tDNA9_ArgTCT_1_+_94313129_94313213@40.68.29
tcaaaggttccgggttcgagtcccggcgg

SEQ ID NO: 4563 - DNA, 17 bp, homo sapiens
  tDNAMT_AspGTC_MT_+_7518_7585@32.48.17
tcaaagttaaattatag

SEQ ID NO: 4564 - DNA, 18 bp, homo sapiens
  tDNAMT_AspGTC_MT_+_7518_7585@32.49.18
tcaaagttaaattatagg

SEQ ID NO: 4565 - DNA, 22 bp, homo sapiens
  tDNA1_TrpCCA_7_+_99067307_99067378@54.75.22,tDNA6
tcaaatcacgtcggggtcacca

SEQ ID NO: 4566 - DNA, 22 bp, homo sapiens
  tDNA65_ProAGG_1_-_167684725_167684796@54.75.22,tr
tcaaatcccggacgagccccca

SEQ ID NO: 4567 - DNA, 22 bp, homo sapiens
  tDNA29_CysGCA_17_-_37017937_37018008@54.75.22,trn
tcaaatccgggtgccccctcca

SEQ ID NO: 4568 - DNA, 22 bp, homo sapiens
  tDNA13_ThrTGT_5_-_180618687_180618758@54.75.22,tr
tcaaatctcgctggggcctcca

SEQ ID NO: 4569 - DNA, 20 bp, homo sapiens
  tDNA42_GlnCTG_6_+_27263212_27263283@54.73.20,tDNA
tcaaatctcggtggaacctc

SEQ ID NO: 4570 - DNA, 21 bp, homo sapiens
  tDNA42_GlnCTG_6_+_27263212_27263283@54.74.21,tDNA
tcaaatctcggtggaacctcc

SEQ ID NO: 4571 - DNA, 22 bp, homo sapiens
  tDNA42_GlnCTG_6_+_27263212_27263283@54.75.22,tDNA
tcaaatctcggtggaacctcca

SEQ ID NO: 4572 - DNA, 22 bp, homo sapiens
  tDNA130_GlnTTG_6_-_27763640_27763711@54.75.22,trn
tcaaatctcggtgggacctcca

SEQ ID NO: 4573 - DNA, 22 bp, homo sapiens
  tDNAMT_ValTAC_MT_+_1602_1670@47.68.22
tcaacttaacttgaccgctctg

SEQ ID NO: 4574 - DNA, 23 bp, homo sapiens
  tDNAMT_ValTAC_MT_+_1602_1670@47.69.23
tcaacttaacttgaccgctctga

SEQ ID NO: 4575 - DNA, 24 bp, homo sapiens
  tDNAMT_ValTAC_MT_+_1602_1670@47.70.24
tcaacttaacttgaccgctctgac

SEQ ID NO: 4576 - DNA, 25 bp, homo sapiens
  tDNAMT_ValTAC_MT_+_1602_1670@47.71.25
tcaacttaacttgaccgctctgacc

SEQ ID NO: 4577 - DNA, 26 bp, homo sapiens
  tDNAMT_ValTAC_MT_+_1602_1670@47.72.26
tcaacttaacttgaccgctctgacca

SEQ ID NO: 4578 - DNA, 22 bp, homo sapiens
  tDNA12_TrpCCA_17_+_19411494_19411565@54.75.22
tcaagtcacgtcggggtcacca

SEQ ID NO: 4579 - DNA, 22 bp, homo sapiens
  tDNA65_AlaAGC_6_+_28574933_28575004@54.75.22,tDNA
tcaatccccggcacctccacca

SEQ ID NO: 4580 - DNA, 22 bp, homo sapiens
  tDNA13_AlaCGC_2_+_157257281_157257352@54.75.22,tr
tcaatccccggcatctccacca

SEQ ID NO: 4581 - DNA, 22 bp, homo sapiens
  tDNA103_PheGAA_6_-_28791093_28791166@56.77.22,trn
tcaatcccgggtttcggcacca

SEQ ID NO: 4582 - DNA, 17 bp, homo sapiens
  tDNAMT_SerGCT_MT_+_12207_12265@9.25.17
tcacaagaactgctaac

SEQ ID NO: 4583 - DNA, 18 bp, homo sapiens
  tDNAMT_SerGCT_MT_+_12207_12265@9.26.18
tcacaagaactgctaact

SEQ ID NO: 4584 - DNA, 19 bp, homo sapiens
  tDNAMT_SerGCT_MT_+_12207_12265@9.27.19
tcacaagaactgctaactc

SEQ ID NO: 4585 - DNA, 20 bp, homo sapiens
  tDNAMT_SerGCT_MT_+_12207_12265@9.28.20
tcacaagaactgctaactca

SEQ ID NO: 4586 - DNA, 22 bp, homo sapiens
  tDNAMT_SerGCT_MT_+_12207_12265@9.30.22
tcacaagaactgctaactcatg

SEQ ID NO: 4587 - DNA, 23 bp, homo sapiens
  tDNAMT_SerGCT_MT_+_12207_12265@9.31.23
tcacaagaactgctaactcatgc

SEQ ID NO: 4588 - DNA, 24 bp, homo sapiens
  tDNAMT_SerGCT_MT_+_12207_12265@9.32.24
tcacaagaactgctaactcatgcc

SEQ ID NO: 4589 - DNA, 30 bp, homo sapiens
  tDNAMT_SerGCT_MT_+_12207_12265@9.38.30
tcacaagaactgctaactcatgcccccatg

SEQ ID NO: 4590 - DNA, 22 bp, homo sapiens
  tDNA157_ValCAC_6_-_27173867_27173939@33.54.22,trn
tcacacgcgaaaggtccccggt

SEQ ID NO: 4591 - DNA, 16 bp, homo sapiens
  tDNAMT_PheGAA_MT_+_577_647@53.68.16
tcacatcaccccataa

SEQ ID NO: 4592 - DNA, 17 bp, homo sapiens
  tDNAMT_PheGAA_MT_+_577_647@53.69.17
tcacatcaccccataaa

SEQ ID NO: 4593 - DNA, 18 bp, homo sapiens
  tDNAMT_PheGAA_MT_+_577_647@53.70.18
tcacatcaccccataaac

SEQ ID NO: 4594 - DNA, 19 bp, homo sapiens
  tDNAMT_PheGAA_MT_+_577_647@53.71.19
tcacatcaccccataaaca

SEQ ID NO: 4595 - DNA, 21 bp, homo sapiens
  tDNAMT_PheGAA_MT_+_577_647@53.73.21
tcacatcaccccataaacacc

SEQ ID NO: 4596 - DNA, 22 bp, homo sapiens
  tDNAMT_PheGAA_MT_+_577_647@53.74.22
tcacatcaccccataaacacca

SEQ ID NO: 4597 - DNA, 30 bp, homo sapiens
  tDNA3_GluTTC_13_-_45492062_45492133@35.64.30,tDNA
tcacccaggcggcccgggttcgactcccgg

SEQ ID NO: 4598 - DNA, 17 bp, homo sapiens
  tDNAMT_PheGAA_MT_+_577_647@58.74.17
tcaccccataaacacca

SEQ ID NO: 4599 - DNA, 20 bp, homo sapiens
  tDNA59_GluCTC_1_+_249168447_249168518@35.54.20,tr
tcaccgccgcggcccgggtt

SEQ ID NO: 4600 - DNA, 30 bp, homo sapiens
  tDNA59_GluCTC_1_+_249168447_249168518@35.64.30,tr
tcaccgccgcggcccgggttcgattcccgg

SEQ ID NO: 4601 - DNA, 16 bp, homo sapiens
  tDNA1_TrpCCA_7_+_99067307_99067378@59.74.16,tDNA6
tcacgtcggggtcacc

SEQ ID NO: 4602 - DNA, 17 bp, homo sapiens
  tDNA1_TrpCCA_7_+_99067307_99067378@59.75.17,tDNA6
tcacgtcggggtcacca

SEQ ID NO: 4603 - DNA, 30 bp, homo sapiens
  tDNA4_ArgTCG_6_+_26323046_26323118@39.68.30
tcagaagattgagggttcgaatccctccgt

SEQ ID NO: 4604 - DNA, 30 bp, homo sapiens
  tDNA1_ArgCCG_16_+_3200675_3200747@39.68.30,tDNA11
tcagaagattgagggttcgagtcccttcgt

SEQ ID NO: 4605 - DNA, 30 bp, homo sapiens
  tDNA4_ArgTCG_15_+_89878304_89878376@39.68.30
tcagaagattgcaggttcgagtcctgccgc

SEQ ID NO: 4606 - DNA, 17 bp, homo sapiens
  tDNA6_TrpCCA_12_+_98898030_98898101@38.54.17
tcagaaggctgcgtgtt

SEQ ID NO: 4607 - DNA, 18 bp, homo sapiens
  tDNA6_TrpCCA_12_+_98898030_98898101@38.55.18
tcagaaggctgcgtgttc

SEQ ID NO: 4608 - DNA, 19 bp, homo sapiens
  tDNA6_TrpCCA_12_+_98898030_98898101@38.56.19
tcagaaggctgcgtgttcg

SEQ ID NO: 4609 - DNA, 21 bp, homo sapiens
  tDNA6_TrpCCA_12_+_98898030_98898101@38.58.21
tcagaaggctgcgtgttcgaa

SEQ ID NO: 4610 - DNA, 17 bp, homo sapiens
  tDNA1_TrpCCA_7_+_99067307_99067378@38.54.17,tDNA6
tcagaaggttgcgtgtt

SEQ ID NO: 4611 - DNA, 18 bp, homo sapiens
  tDNA1_TrpCCA_7_+_99067307_99067378@38.55.18,tDNA6
tcagaaggttgcgtgttc

SEQ ID NO: 4612 - DNA, 19 bp, homo sapiens
  tDNA1_TrpCCA_7_+_99067307_99067378@38.56.19,tDNA6
tcagaaggttgcgtgttca

SEQ ID NO: 4613 - DNA, 20 bp, homo sapiens
  tDNA1_TrpCCA_7_+_99067307_99067378@38.57.20,tDNA6
tcagaaggttgcgtgttcaa

SEQ ID NO: 4614 - DNA, 21 bp, homo sapiens
  tDNA1_TrpCCA_7_+_99067307_99067378@38.58.21,tDNA6
tcagaaggttgcgtgttcaaa

SEQ ID NO: 4615 - DNA, 30 bp, homo sapiens
  tDNA1_TrpCCA_7_+_99067307_99067378@38.67.30,tDNA6
tcagaaggttgcgtgttcaaatcacgtcgg

SEQ ID NO: 4616 - DNA, 21 bp, homo sapiens
  tDNA12_TrpCCA_17_+_19411494_19411565@38.58.21
tcagaaggttgcgtgttcaag

SEQ ID NO: 4617 - DNA, 19 bp, homo sapiens
  tDNAMT_HisGTG_MT_+_12138_12206@24.42.19
tcagattgtgaatctgaca

SEQ ID NO: 4618 - DNA, 22 bp, homo sapiens
  tDNAMT_HisGTG_MT_+_12138_12206@24.45.22
tcagattgtgaatctgacaaca

SEQ ID NO: 4619 - DNA, 28 bp, homo sapiens
  tDNA23_ArgCCG_17_-_66016013_66016085@27.54.28
tcagcctccggagctggggattgtgggt

SEQ ID NO: 4620 - DNA, 19 bp, homo sapiens
  tDNA149_LysTTT_6_-_27302769_27302841@12.30.19,trn
tcagtcggtagagcatcag

SEQ ID NO: 4621 - DNA, 20 bp, homo sapiens
  tDNA149_LysTTT_6_-_27302769_27302841@12.31.20,trn
tcagtcggtagagcatcaga

SEQ ID NO: 4622 - DNA, 21 bp, homo sapiens
  tDNA149_LysTTT_6_-_27302769_27302841@12.32.21,trn
tcagtcggtagagcatcagac

SEQ ID NO: 4623 - DNA, 24 bp, homo sapiens
  tDNA149_LysTTT_6_-_27302769_27302841@12.35.24,trn
tcagtcggtagagcatcagacttt

SEQ ID NO: 4624 - DNA, 25 bp, homo sapiens
  tDNA149_LysTTT_6_-_27302769_27302841@12.36.25,trn
tcagtcggtagagcatcagactttt

SEQ ID NO: 4625 - DNA, 26 bp, homo sapiens
  tDNA149_LysTTT_6_-_27302769_27302841@12.37.26,trn
tcagtcggtagagcatcagactttta

SEQ ID NO: 4626 - DNA, 21 bp, homo sapiens
  tDNA4_LysCTT_18_-_43669271_43669343@12.32.21,tDNA
tcagtcggtagagcatgggac

SEQ ID NO: 4627 - DNA, 24 bp, homo sapiens
  tDNA4_LysCTT_18_-_43669271_43669343@12.35.24,tDNA
tcagtcggtagagcatgggactct

SEQ ID NO: 4628 - DNA, 17 bp, homo sapiens
  tDNA91_GlyCCC_1_-_149680210_149680280@12.28.17,tr
tcagtggtagaattctc

SEQ ID NO: 4629 - DNA, 18 bp, homo sapiens
  tDNA91_GlyCCC_1_-_149680210_149680280@12.29.18,tr
tcagtggtagaattctcg

SEQ ID NO: 4630 - DNA, 19 bp, homo sapiens
  tDNA91_GlyCCC_1_-_149680210_149680280@12.30.19,tr
tcagtggtagaattctcgc

SEQ ID NO: 4631 - DNA, 20 bp, homo sapiens
  tDNA91_GlyCCC_1_-_149680210_149680280@12.31.20,tr
tcagtggtagaattctcgcc

SEQ ID NO: 4632 - DNA, 21 bp, homo sapiens
  tDNA91_GlyCCC_1_-_149680210_149680280@12.32.21,tr
tcagtggtagaattctcgcct

SEQ ID NO: 4633 - DNA, 22 bp, homo sapiens
  tDNA18_GlyGCC_16_+_70822597_70822667@12.33.22,trn
tcagtggtagaattctcgcctg

SEQ ID NO: 4634 - DNA, 23 bp, homo sapiens
  tDNA18_GlyGCC_16_+_70822597_70822667@12.34.23,trn
tcagtggtagaattctcgcctgc

SEQ ID NO: 4635 - DNA, 19 bp, homo sapiens
  tDNA7_CysGCA_3_-_131947944_131948015@12.30.19,trn
tcagtggtagagcatttga

SEQ ID NO: 4636 - DNA, 21 bp, homo sapiens
  tDNA7_CysGCA_3_-_131947944_131948015@12.32.21,trn
tcagtggtagagcatttgact

SEQ ID NO: 4637 - DNA, 22 bp, homo sapiens
  tDNA7_CysGCA_3_-_131947944_131948015@12.33.22,trn
tcagtggtagagcatttgactg

SEQ ID NO: 4638 - DNA, 23 bp, homo sapiens
  tDNA7_CysGCA_3_-_131947944_131948015@12.34.23,trn
tcagtggtagagcatttgactgc

SEQ ID NO: 4639 - DNA, 18 bp, homo sapiens
  tDNAMT_GluTTC_MT_-_14674_14742@32.49.18,tDNAlooka
tcatatcattggtcgtgg

SEQ ID NO: 4640 - DNA, 23 bp, homo sapiens
  tDNAMT_GluTTC_MT_-_14674_14742@32.54.23,tDNAlooka
tcatatcattggtcgtggttgta

SEQ ID NO: 4641 - DNA, 30 bp, homo sapiens
  tDNAMT_GluTTC_MT_-_14674_14742@32.61.30,tDNAlooka
tcatatcattggtcgtggttgtagtccgtg

SEQ ID NO: 4642 - DNA, 16 bp, homo sapiens
  tDNAMT_ArgTCG_MT_+_10405_10469@53.68.16
tcatatttaccaacca

SEQ ID NO: 4643 - DNA, 20 bp, homo sapiens
  tDNAMT_SerGCT_MT_+_12207_12265@26.45.20
tcatgcccccatgtctaaca

SEQ ID NO: 4644 - DNA, 23 bp, homo sapiens
  tDNAMT_SerGCT_MT_+_12207_12265@26.48.23
tcatgcccccatgtctaacaaca

SEQ ID NO: 4645 - DNA, 27 bp, homo sapiens
  tDNAMT_SerGCT_MT_+_12207_12265@26.52.27
tcatgcccccatgtctaacaacatggc

SEQ ID NO: 4646 - DNA, 17 bp, homo sapiens
  tDNAMT_GluTTC_MT_-_14674_14742@37.53.17,tDNAlooka
tcattggtcgtggttgt

SEQ ID NO: 4647 - DNA, 18 bp, homo sapiens
  tDNAMT_GluTTC_MT_-_14674_14742@37.54.18,tDNAlooka
tcattggtcgtggttgta

SEQ ID NO: 4648 - DNA, 19 bp, homo sapiens
  tDNAMT_GluTTC_MT_-_14674_14742@37.55.19,tDNAlooka
tcattggtcgtggttgtag

SEQ ID NO: 4649 - DNA, 20 bp, homo sapiens
  tDNAMT_GluTTC_MT_-_14674_14742@37.56.20,tDNAlooka
tcattggtcgtggttgtagt

SEQ ID NO: 4650 - DNA, 21 bp, homo sapiens
  tDNAMT_GluTTC_MT_-_14674_14742@37.57.21,tDNAlooka
tcattggtcgtggttgtagtc

SEQ ID NO: 4651 - DNA, 22 bp, homo sapiens
  tDNAMT_GluTTC_MT_-_14674_14742@37.58.22,tDNAlooka
tcattggtcgtggttgtagtcc

SEQ ID NO: 4652 - DNA, 23 bp, homo sapiens
  tDNAMT_GluTTC_MT_-_14674_14742@37.59.23,tDNAlooka
tcattggtcgtggttgtagtccg

SEQ ID NO: 4653 - DNA, 24 bp, homo sapiens
  tDNAMT_GluTTC_MT_-_14674_14742@37.60.24,tDNAlooka
tcattggtcgtggttgtagtccgt

SEQ ID NO: 4654 - DNA, 25 bp, homo sapiens
  tDNAMT_GluTTC_MT_-_14674_14742@37.61.25,tDNAlooka
tcattggtcgtggttgtagtccgtg

SEQ ID NO: 4655 - DNA, 26 bp, homo sapiens
  tDNAMT_GluTTC_MT_-_14674_14742@37.62.26,tDNAlooka
tcattggtcgtggttgtagtccgtgc

SEQ ID NO: 4656 - DNA, 27 bp, homo sapiens
  tDNAMT_GluTTC_MT_-_14674_14742@37.63.27,tDNAlooka
tcattggtcgtggttgtagtccgtgcg

SEQ ID NO: 4657 - DNA, 29 bp, homo sapiens
  tDNAMT_GluTTC_MT_-_14674_14742@37.65.29,tDNAlooka
tcattggtcgtggttgtagtccgtgcgag

SEQ ID NO: 4658 - DNA, 18 bp, homo sapiens
  tDNA100_LeuCAA_6_-_28864000_28864105@47.64.18,trn
tccaatggaggcgtgggt

SEQ ID NO: 4659 - DNA, 27 bp, homo sapiens
  tDNA42_GlnCTG_6_+_27263212_27263283@4.30.27,tDNA1
tccatggtgtaatggttagcactctgg

SEQ ID NO: 4660 - DNA, 16 bp, homo sapiens
  tDNA3_GluTTC_13_-_45492062_45492133@1.16.16,tDNA1
tcccacatggtctagc

SEQ ID NO: 4661 - DNA, 17 bp, homo sapiens
  tDNA3_GluTTC_13_-_45492062_45492133@1.17.17,tDNA1
tcccacatggtctagcg

SEQ ID NO: 4662 - DNA, 18 bp, homo sapiens
  tDNA3_GluTTC_13_-_45492062_45492133@1.18.18,tDNA1
tcccacatggtctagcgg

SEQ ID NO: 4663 - DNA, 19 bp, homo sapiens
  tDNA3_GluTTC_13_-_45492062_45492133@1.19.19,tDNA1
tcccacatggtctagcggt

SEQ ID NO: 4664 - DNA, 21 bp, homo sapiens
  tDNA3_GluTTC_13_-_45492062_45492133@1.21.21,tDNA1
tcccacatggtctagcggtta

SEQ ID NO: 4665 - DNA, 22 bp, homo sapiens
  tDNA3_GluTTC_13_-_45492062_45492133@1.22.22,tDNA1
tcccacatggtctagcggttag

SEQ ID NO: 4666 - DNA, 23 bp, homo sapiens
  tDNA3_GluTTC_13_-_45492062_45492133@1.23.23,tDNA1
tcccacatggtctagcggttagg

SEQ ID NO: 4667 - DNA, 24 bp, homo sapiens
  tDNA3_GluTTC_13_-_45492062_45492133@1.24.24,tDNA1
tcccacatggtctagcggttagga

SEQ ID NO: 4668 - DNA, 25 bp, homo sapiens
  tDNA3_GluTTC_13_-_45492062_45492133@1.25.25,tDNA1
tcccacatggtctagcggttaggat

SEQ ID NO: 4669 - DNA, 26 bp, homo sapiens
  tDNA3_GluTTC_13_-_45492062_45492133@1.26.26,tDNA1
tcccacatggtctagcggttaggatt

SEQ ID NO: 4670 - DNA, 27 bp, homo sapiens
  tDNA3_GluTTC_13_-_45492062_45492133@1.27.27,tDNA1
tcccacatggtctagcggttaggattc

SEQ ID NO: 4671 - DNA, 28 bp, homo sapiens
  tDNA3_GluTTC_13_-_45492062_45492133@1.28.28,tDNA1
tcccacatggtctagcggttaggattcc

SEQ ID NO: 4672 - DNA, 29 bp, homo sapiens
  tDNA3_GluTTC_13_-_45492062_45492133@1.29.29,tDNA1
tcccacatggtctagcggttaggattcct

SEQ ID NO: 4673 - DNA, 30 bp, homo sapiens
  tDNA3_GluTTC_13_-_45492062_45492133@1.30.30,tDNA1
tcccacatggtctagcggttaggattcctg

SEQ ID NO: 4674 - DNA, 17 bp, homo sapiens
  tDNA2_LeuTAG_14_+_21093529_21093610@69.85.17
tcccaccactgccacca

SEQ ID NO: 4675 - DNA, 17 bp, homo sapiens
  tDNA4_ArgTCT_17_+_8024243_8024330@60.76.17,tDNA3_
tcccaccagagtcgcca

SEQ ID NO: 4676 - DNA, 18 bp, homo sapiens
  tDNA47_AsnGTT_1_+_161510031_161510104@60.77.18
tcccacccagggacgcca

SEQ ID NO: 4677 - DNA, 17 bp, homo sapiens
  tDNA31_SerGCT_6_+_27065085_27065166@69.85.17
tcccaccctcgtcgcca

SEQ ID NO: 4678 - DNA, 16 bp, homo sapiens
  tDNA126_LeuAAG_6_-_28446400_28446481@69.84.16,trn
tcccaccgctgccacc

SEQ ID NO: 4679 - DNA, 17 bp, homo sapiens
  tDNA126_LeuAAG_6_-_28446400_28446481@69.85.17,trn
tcccaccgctgccacca

SEQ ID NO: 4680 - DNA, 17 bp, homo sapiens
  tDNA43_SerGCT_6_+_27265775_27265856@69.85.17
tcccaccttcgtcgcca

SEQ ID NO: 4681 - DNA, 16 bp, homo sapiens
  tDNA34_LeuCAG_1_+_161411323_161411405@70.85.16,tr
tcccactcctgacacc

SEQ ID NO: 4682 - DNA, 17 bp, homo sapiens
  tDNA34_LeuCAG_1_+_161411323_161411405@70.86.17,tr
tcccactcctgacacca

SEQ ID NO: 4683 - DNA, 16 bp, homo sapiens
  tDNA17_LeuCAG_16_+_57333863_57333945@70.85.16,trn
tcccacttctgacacc

SEQ ID NO: 4684 - DNA, 17 bp, homo sapiens
  tDNA17_LeuCAG_16_+_57333863_57333945@70.86.17,trn
tcccacttctgacacca

SEQ ID NO: 4685 - DNA, 17 bp, homo sapiens
  tDNA34_ThrAGT_6_+_27130050_27130123@61.77.17,tDNA
tcccagcggggcctcca

SEQ ID NO: 4686 - DNA, 17 bp, homo sapiens
  tDNA40_ThrAGT_17_-_8042770_8042843@61.77.17,tDNA3
tcccagcggtgcctcca

SEQ ID NO: 4687 - DNA, 17 bp, homo sapiens
  tDNA127_ThrTGT_6_-_28442329_28442402@61.77.17
tcccagtagagcctcca

SEQ ID NO: 4688 - DNA, 16 bp, homo sapiens
  tDNA5_GluTTC_13_-_41634874_41634945@1.16.16,tDNA2
tcccatatggtctagc

SEQ ID NO: 4689 - DNA, 17 bp, homo sapiens
  tDNA5_GluTTC_13_-_41634874_41634945@1.17.17,tDNA2
tcccatatggtctagcg

SEQ ID NO: 4690 - DNA, 18 bp, homo sapiens
  tDNA5_GluTTC_13_-_41634874_41634945@1.18.18,tDNA2
tcccatatggtctagcgg

SEQ ID NO: 4691 - DNA, 19 bp, homo sapiens
  tDNA5_GluTTC_13_-_41634874_41634945@1.19.19,tDNA2
tcccatatggtctagcggt

SEQ ID NO: 4692 - DNA, 22 bp, homo sapiens
  tDNA5_GluTTC_13_-_41634874_41634945@1.22.22,tDNA2
tcccatatggtctagcggttag

SEQ ID NO: 4693 - DNA, 23 bp, homo sapiens
  tDNA5_GluTTC_13_-_41634874_41634945@1.23.23,tDNA2
tcccatatggtctagcggttagg

SEQ ID NO: 4694 - DNA, 24 bp, homo sapiens
  tDNA5_GluTTC_13_-_41634874_41634945@1.24.24,tDNA2
tcccatatggtctagcggttagga

SEQ ID NO: 4695 - DNA, 25 bp, homo sapiens
  tDNA5_GluTTC_13_-_41634874_41634945@1.25.25,tDNA2
tcccatatggtctagcggttaggat

SEQ ID NO: 4696 - DNA, 26 bp, homo sapiens
  tDNA5_GluTTC_13_-_41634874_41634945@1.26.26,tDNA2
tcccatatggtctagcggttaggatt

SEQ ID NO: 4697 - DNA, 27 bp, homo sapiens
  tDNA5_GluTTC_13_-_41634874_41634945@1.27.27,tDNA2
tcccatatggtctagcggttaggattc

SEQ ID NO: 4698 - DNA, 28 bp, homo sapiens
  tDNA5_GluTTC_13_-_41634874_41634945@1.28.28,tDNA2
tcccatatggtctagcggttaggattcc

SEQ ID NO: 4699 - DNA, 29 bp, homo sapiens
  tDNA5_GluTTC_13_-_41634874_41634945@1.29.29,tDNA2
tcccatatggtctagcggttaggattcct

SEQ ID NO: 4700 - DNA, 30 bp, homo sapiens
  tDNA5_GluTTC_13_-_41634874_41634945@1.30.30,tDNA2
tcccatatggtctagcggttaggattcctg

SEQ ID NO: 4701 - DNA, 17 bp, homo sapiens
  tDNA175_SerGCT_6_-_26305718_26305801@71.87.17,trn
tcccatcctcgtcgcca

SEQ ID NO: 4702 - DNA, 28 bp, homo sapiens
  tDNA84_GlnTTG_6_+_145503859_145503930@3.30.28,trn
tcccatggtgtaatggttagcactctgg

SEQ ID NO: 4703 - DNA, 18 bp, homo sapiens
  tDNA87_AlaAGC_1_-_150017382_150017452@57.74.18,tr
tccccagcacctccacca

SEQ ID NO: 4704 - DNA, 18 bp, homo sapiens
  tDNA120_AlaAGC_6_-_28626014_28626085@58.75.18
tccccagcatctccacca

SEQ ID NO: 4705 - DNA, 17 bp, homo sapiens
  tDNA108_AlaAGC_6_-_28763741_28763812@58.74.17
tccccagtacctccacc

SEQ ID NO: 4706 - DNA, 18 bp, homo sapiens
  tDNA108_AlaAGC_6_-_28763741_28763812@58.75.18
tccccagtacctccacca

SEQ ID NO: 4707 - DNA, 18 bp, homo sapiens
  tDNA107_AlaTGC_6_-_28770577_28770647@57.74.18,trn
tccccgacacctccacca

SEQ ID NO: 4708 - DNA, 26 bp, homo sapiens
  tDNA69_AspGTC_1_-_161440205_161440276@25.50.26,tr
tccccgcctgtcacgcgggagaccgg

SEQ ID NO: 4709 - DNA, 22 bp, homo sapiens
  tDNA145_SerAGA_6_-_27521192_27521273@51.72.22,trn
tccccgcgcaggttcgaatcct

SEQ ID NO: 4710 - DNA, 16 bp, homo sapiens
  tDNA65_AlaAGC_6_+_28574933_28575004@58.73.16,tDNA
tccccggcacctccac

SEQ ID NO: 4711 - DNA, 17 bp, homo sapiens
  tDNA65_AlaAGC_6_+_28574933_28575004@58.74.17,tDNA
tccccggcacctccacc

SEQ ID NO: 4712 - DNA, 18 bp, homo sapiens
  tDNA65_AlaAGC_6_+_28574933_28575004@58.75.18,tDNA
tccccggcacctccacca

SEQ ID NO: 4713 - DNA, 17 bp, homo sapiens
  tDNA13_AlaCGC_2_+_157257281_157257352@58.74.17,tr
tccccggcatctccacc

SEQ ID NO: 4714 - DNA, 18 bp, homo sapiens
  tDNA13_AlaCGC_2_+_157257281_157257352@58.75.18,tr
tccccggcatctccacca

SEQ ID NO: 4715 - DNA, 18 bp, homo sapiens
  tDNA57_IleAAT_6_+_27636362_27636435@60.77.18,tDNA
tccccgtacgggccacca

SEQ ID NO: 4716 - DNA, 18 bp, homo sapiens
  tDNA163_IleAAT_6_-_26745255_26745328@60.77.18,trn
tccccgtactggccacca

SEQ ID NO: 4717 - DNA, 17 bp, homo sapiens
  tDNA65_ProAGG_1_-_167684725_167684796@59.75.17,tr
tcccggacgagccccca

SEQ ID NO: 4718 - DNA, 17 bp, homo sapiens
  tDNA10_GlyTCC_17_+_8124866_8124937@59.75.17,tDNA1
tcccggccaacgcacca

SEQ ID NO: 4719 - DNA, 17 bp, homo sapiens
  tDNA2_GlyCCC_1_+_17053780_17053850@58.74.17,tDNA1
tcccggccaatgcacca

SEQ ID NO: 4720 - DNA, 17 bp, homo sapiens
  tDNA35_GlyGCC_1_+_161413094_161413164@58.74.17,tr
tcccggcccatgcacca

SEQ ID NO: 4721 - DNA, 17 bp, homo sapiens
  tDNA103_PheGAA_6_-_28791093_28791166@60.76.17,trn
tcccgggtttcggcacc

SEQ ID NO: 4722 - DNA, 18 bp, homo sapiens
  tDNA103_PheGAA_6_-_28791093_28791166@60.77.18,trn
tcccgggtttcggcacca

SEQ ID NO: 4723 - DNA, 17 bp, homo sapiens
  tDNA10_GluCTC_3_-_103879524_103879595@59.75.17,tr
tcccggtcagggaacca

SEQ ID NO: 4724 - DNA, 19 bp, homo sapiens
  tDNA85_GluTTC_6_-_163210014_163210082@1.19.19
tccctggtctagtggttag

SEQ ID NO: 4725 - DNA, 20 bp, homo sapiens
  tDNA85_GluTTC_6_-_163210014_163210082@1.20.20
tccctggtctagtggttagg

SEQ ID NO: 4726 - DNA, 21 bp, homo sapiens
  tDNA85_GluTTC_6_-_163210014_163210082@1.21.21
tccctggtctagtggttagga

SEQ ID NO: 4727 - DNA, 23 bp, homo sapiens
  tDNA85_GluTTC_6_-_163210014_163210082@1.23.23
tccctggtctagtggttaggatt

SEQ ID NO: 4728 - DNA, 16 bp, homo sapiens
  tDNA59_GluCTC_1_+_249168447_249168518@1.16.16,trn
tccctggtggtctagt

SEQ ID NO: 4729 - DNA, 17 bp, homo sapiens
  tDNA59_GluCTC_1_+_249168447_249168518@1.17.17,trn
tccctggtggtctagtg

SEQ ID NO: 4730 - DNA, 18 bp, homo sapiens
  tDNA59_GluCTC_1_+_249168447_249168518@1.18.18,trn
tccctggtggtctagtgg

SEQ ID NO: 4731 - DNA, 19 bp, homo sapiens
  tDNA94_GluTTC_1_-_149664355_149664427@1.19.19,trn
tccctggtggtctagtggc

SEQ ID NO: 4732 - DNA, 22 bp, homo sapiens
  tDNA94_GluTTC_1_-_149664355_149664427@1.22.22,trn
tccctggtggtctagtggctag

SEQ ID NO: 4733 - DNA, 23 bp, homo sapiens
  tDNA94_GluTTC_1_-_149664355_149664427@1.23.23,trn
tccctggtggtctagtggctagg

SEQ ID NO: 4734 - DNA, 24 bp, homo sapiens
  tDNA94_GluTTC_1_-_149664355_149664427@1.24.24,trn
tccctggtggtctagtggctagga

SEQ ID NO: 4735 - DNA, 29 bp, homo sapiens
  tDNA94_GluTTC_1_-_149664355_149664427@1.29.29,trn
tccctggtggtctagtggctaggattcgg

SEQ ID NO: 4736 - DNA, 30 bp, homo sapiens
  tDNA94_GluTTC_1_-_149664355_149664427@1.30.30,trn
tccctggtggtctagtggctaggattcggc

SEQ ID NO: 4737 - DNA, 19 bp, homo sapiens
  tDNA59_GluCTC_1_+_249168447_249168518@1.19.19,trn
tccctggtggtctagtggt

SEQ ID NO: 4738 - DNA, 21 bp, homo sapiens
  tDNA59_GluCTC_1_+_249168447_249168518@1.21.21,trn
tccctggtggtctagtggtta

SEQ ID NO: 4739 - DNA, 22 bp, homo sapiens
  tDNA59_GluCTC_1_+_249168447_249168518@1.22.22,trn
tccctggtggtctagtggttag

SEQ ID NO: 4740 - DNA, 23 bp, homo sapiens
  tDNA59_GluCTC_1_+_249168447_249168518@1.23.23,trn
tccctggtggtctagtggttagg

SEQ ID NO: 4741 - DNA, 24 bp, homo sapiens
  tDNA59_GluCTC_1_+_249168447_249168518@1.24.24,trn
tccctggtggtctagtggttagga

SEQ ID NO: 4742 - DNA, 25 bp, homo sapiens
  tDNA59_GluCTC_1_+_249168447_249168518@1.25.25,trn
tccctggtggtctagtggttaggat

SEQ ID NO: 4743 - DNA, 26 bp, homo sapiens
  tDNA59_GluCTC_1_+_249168447_249168518@1.26.26,trn
tccctggtggtctagtggttaggatt

SEQ ID NO: 4744 - DNA, 27 bp, homo sapiens
  tDNA59_GluCTC_1_+_249168447_249168518@1.27.27,trn
tccctggtggtctagtggttaggattc

SEQ ID NO: 4745 - DNA, 28 bp, homo sapiens
  tDNA59_GluCTC_1_+_249168447_249168518@1.28.28,trn
tccctggtggtctagtggttaggattcg

SEQ ID NO: 4746 - DNA, 29 bp, homo sapiens
  tDNA59_GluCTC_1_+_249168447_249168518@1.29.29,trn
tccctggtggtctagtggttaggattcgg

SEQ ID NO: 4747 - DNA, 30 bp, homo sapiens
  tDNA59_GluCTC_1_+_249168447_249168518@1.30.30,trn
tccctggtggtctagtggttaggattcggc

SEQ ID NO: 4748 - DNA, 17 bp, homo sapiens
  tDNA64_GluTTC_1_-_172157539_172157607@-1T.16.17
tccctgtggtctagtgg

SEQ ID NO: 4749 - DNA, 21 bp, homo sapiens
  tDNA64_GluTTC_1_-_172157539_172157607@-1T.20.21
tccctgtggtctagtggttag

SEQ ID NO: 4750 - DNA, 22 bp, homo sapiens
  tDNA64_GluTTC_1_-_172157539_172157607@-1T.21.22
tccctgtggtctagtggttagg

SEQ ID NO: 4751 - DNA, 23 bp, homo sapiens
  tDNA64_GluTTC_1_-_172157539_172157607@-1T.22.23
tccctgtggtctagtggttagga

SEQ ID NO: 4752 - DNA, 17 bp, homo sapiens
  tDNA5_LysTTT_11_+_59323902_59323974@60.76.17,tDNA
tccctgttcgggcgcca

SEQ ID NO: 4753 - DNA, 20 bp, homo sapiens
  tDNA23_ArgCCG_17_-_66016013_66016085@33.52.20
tccggagctggggattgtgg

SEQ ID NO: 4754 - DNA, 17 bp, homo sapiens
  tDNA58_LeuCAA_1_+_249168054_249168159@47.63.17
tccggatggaggcgtgg

SEQ ID NO: 4755 - DNA, 18 bp, homo sapiens
  tDNA58_LeuCAA_1_+_249168054_249168159@47.64.18
tccggatggaggcgtggg

SEQ ID NO: 4756 - DNA, 19 bp, homo sapiens
  tDNA58_LeuCAA_1_+_249168054_249168159@47.65.19
tccggatggaggcgtgggt

SEQ ID NO: 4757 - DNA, 16 bp, homo sapiens
  tDNA19_TyrGTA_14_-_21121258_21121351@60.75.16,trn
tccggctcgaaggacc

SEQ ID NO: 4758 - DNA, 17 bp, homo sapiens
  tDNA19_TyrGTA_14_-_21121258_21121351@60.76.17,trn
tccggctcgaaggacca

SEQ ID NO: 4759 - DNA, 17 bp, homo sapiens
  tDNA16_TyrGTA_6_+_26577332_26577420@60.76.17,tDNA
tccggctcggaggacca

SEQ ID NO: 4760 - DNA, 17 bp, homo sapiens
  tDNA29_CysGCA_17_-_37017937_37018008@59.75.17,trn
tccgggtgccccctcca

SEQ ID NO: 4761 - DNA, 17 bp, homo sapiens
  tDNAMT_GluTTC_MT_-_14674_14742@56.72.17,tDNAlooka
tccgtgcgagaatacca

SEQ ID NO: 4762 - DNA, 19 bp, homo sapiens
  tDNA12_ArgCCT_16_+_3243918_3243990@33.51.19,tDNA3
tcctaagccagggattgtg

SEQ ID NO: 4763 - DNA, 20 bp, homo sapiens
  tDNA12_ArgCCT_16_+_3243918_3243990@33.52.20,tDNA3
tcctaagccagggattgtgg

SEQ ID NO: 4764 - DNA, 21 bp, homo sapiens
  tDNA12_ArgCCT_16_+_3243918_3243990@33.53.21,tDNA3
tcctaagccagggattgtggg

SEQ ID NO: 4765 - DNA, 22 bp, homo sapiens
  tDNA12_ArgCCT_16_+_3243918_3243990@33.54.22,tDNA3
tcctaagccagggattgtgggt

SEQ ID NO: 4766 - DNA, 23 bp, homo sapiens
  tDNA12_ArgCCT_16_+_3243918_3243990@33.55.23,tDNA3
tcctaagccagggattgtgggtt

SEQ ID NO: 4767 - DNA, 17 bp, homo sapiens
  tDNAMT_AspGTC_MT_+_7518_7585@55.71.17
tcctatatatcttacca

SEQ ID NO: 4768 - DNA, 16 bp, homo sapiens
  tDNA144_AspGTC_6_-_27551236_27551307@1.16.16,tDNA
tcctcgttagtatagt

SEQ ID NO: 4769 - DNA, 18 bp, homo sapiens
  tDNA144_AspGTC_6_-_27551236_27551307@1.18.18,tDNA
tcctcgttagtatagtgg

SEQ ID NO: 4770 - DNA, 19 bp, homo sapiens
  tDNA144_AspGTC_6_-_27551236_27551307@1.19.19,tDNA
tcctcgttagtatagtggt

SEQ ID NO: 4771 - DNA, 20 bp, homo sapiens
  tDNA144_AspGTC_6_-_27551236_27551307@1.20.20,tDNA
tcctcgttagtatagtggtg

SEQ ID NO: 4772 - DNA, 21 bp, homo sapiens
  tDNA144_AspGTC_6_-_27551236_27551307@1.21.21,tDNA
tcctcgttagtatagtggtga

SEQ ID NO: 4773 - DNA, 22 bp, homo sapiens
  tDNA144_AspGTC_6_-_27551236_27551307@1.22.22,tDNA
tcctcgttagtatagtggtgag

SEQ ID NO: 4774 - DNA, 23 bp, homo sapiens
  tDNA144_AspGTC_6_-_27551236_27551307@1.23.23,tDNA
tcctcgttagtatagtggtgagt

SEQ ID NO: 4775 - DNA, 30 bp, homo sapiens
  tDNA69_AspGTC_1_-_161440205_161440276@1.30.30,trn
tcctcgttagtatagtggtgagtatccccg

SEQ ID NO: 4776 - DNA, 22 bp, homo sapiens
  tDNA5_AspGTC_12_+_98897281_98897352@1.22.22
tcctcgttagtatagtggttag

SEQ ID NO: 4777 - DNA, 23 bp, homo sapiens
  tDNA5_AspGTC_12_+_98897281_98897352@1.23.23
tcctcgttagtatagtggttagt

SEQ ID NO: 4778 - DNA, 17 bp, homo sapiens
  tDNA4_LeuTAA_20_-_55933428_55933502@62.78.17,tDNA
tcctcttcttaacacca

SEQ ID NO: 4779 - DNA, 16 bp, homo sapiens
  tDNA145_SerAGA_6_-_27521192_27521273@69.84.16,trn
tcctgccgactacgcc

SEQ ID NO: 4780 - DNA, 17 bp, homo sapiens
  tDNA145_SerAGA_6_-_27521192_27521273@69.85.17,trn
tcctgccgactacgcca

SEQ ID NO: 4781 - DNA, 17 bp, homo sapiens
  tDNA4_ArgTCG_15_+_89878304_89878376@60.76.17
tcctgccgcggtcgcca

SEQ ID NO: 4782 - DNA, 17 bp, homo sapiens
  tDNA137_SerCGA_6_-_27640229_27640310@69.85.17,trn
tcctgctcacagcgcca

SEQ ID NO: 4783 - DNA, 17 bp, homo sapiens
  tDNA11_ArgACG_3_-_45730491_45730563@60.76.17,tDNA
tcctggctggctcgcca

SEQ ID NO: 4784 - DNA, 17 bp, homo sapiens
  tDNA2_SerCGA_12_+_56584148_56584229@69.85.17
tcctgttcgtgacgcca

SEQ ID NO: 4785 - DNA, 18 bp, homo sapiens
  tDNA19_TyrGTA_14_-_21121258_21121351@39.56.18,trn
tccttaggtcgctggttc

SEQ ID NO: 4786 - DNA, 17 bp, homo sapiens
  tDNA32_SerTGA_17_-_22028179_22028247@56.72.17,trn
tccttccttttttgcca

SEQ ID NO: 4787 - DNA, 20 bp, homo sapiens
  tDNA32_MetCAT_1_+_153643726_153643797@54.73.20,tr
tcgaaaccatcctctgctac

SEQ ID NO: 4788 - DNA, 21 bp, homo sapiens
  tDNA32_MetCAT_1_+_153643726_153643797@54.74.21,tr
tcgaaaccatcctctgctacc

SEQ ID NO: 4789 - DNA, 22 bp, homo sapiens
  tDNA32_MetCAT_1_+_153643726_153643797@54.75.22,tr
tcgaaaccatcctctgctacca

SEQ ID NO: 4790 - DNA, 22 bp, homo sapiens
  tDNA152_ValCAC_6_-_27248049_27248121@55.76.22
tcgaaaccgggcagaagcacca

SEQ ID NO: 4791 - DNA, 16 bp, homo sapiens
  tDNA136_ValAAC_6_-_27648885_27648957@55.70.16,trn
tcgaaaccgggcggaa

SEQ ID NO: 4792 - DNA, 18 bp, homo sapiens
  tDNA136_ValAAC_6_-_27648885_27648957@55.72.18,trn
tcgaaaccgggcggaaac

SEQ ID NO: 4793 - DNA, 19 bp, homo sapiens
  tDNA136_ValAAC_6_-_27648885_27648957@55.73.19,trn
tcgaaaccgggcggaaaca

SEQ ID NO: 4794 - DNA, 22 bp, homo sapiens
  tDNA136_ValAAC_6_-_27648885_27648957@55.76.22,trn
tcgaaaccgggcggaaacacca

SEQ ID NO: 4795 - DNA, 22 bp, homo sapiens
  tDNA83_LeuTAA_6_+_144537684_144537766@65.86.22
tcgaaccccactcctggtacca

SEQ ID NO: 4796 - DNA, 22 bp, homo sapiens
  tDNA14_ThrCGT_17_+_29877093_29877164@54.75.22,trn
tcgaaccccgtccgtgcctcca

SEQ ID NO: 4797 - DNA, 22 bp, homo sapiens
  tDNA2_SerTGA_10_+_69524261_69524342@64.85.22
tcgaaccctgctcgctgcgcca

SEQ ID NO: 4798 - DNA, 20 bp, homo sapiens
  tDNA6_TrpCCA_12_+_98898030_98898101@54.73.20
tcgaatcacgtcggggtcac

SEQ ID NO: 4799 - DNA, 22 bp, homo sapiens
  tDNA6_TrpCCA_12_+_98898030_98898101@54.75.22
tcgaatcacgtcggggtcacca

SEQ ID NO: 4800 - DNA, 22 bp, homo sapiens
  tDNA2_LeuTAG_14_+_21093529_21093610@64.85.22
tcgaatcccaccactgccacca

SEQ ID NO: 4801 - DNA, 22 bp, homo sapiens
  tDNA4_ArgTCT_17_+_8024243_8024330@55.76.22
tcgaatcccaccagagtcgcca

SEQ ID NO: 4802 - DNA, 22 bp, homo sapiens
  tDNA31_SerGCT_6_+_27065085_27065166@64.85.22
tcgaatcccaccctcgtcgcca

SEQ ID NO: 4803 - DNA, 22 bp, homo sapiens
  tDNA1_LeuAAG_14_+_21078291_21078372@64.85.22,tDNA
tcgaatcccaccgctgccacca

SEQ ID NO: 4804 - DNA, 22 bp, homo sapiens
  tDNA43_SerGCT_6_+_27265775_27265856@64.85.22
tcgaatcccaccttcgtcgcca

SEQ ID NO: 4805 - DNA, 21 bp, homo sapiens
  tDNA34_LeuCAG_1_+_161411323_161411405@65.85.21,tr
tcgaatcccactcctgacacc

SEQ ID NO: 4806 - DNA, 22 bp, homo sapiens
  tDNA34_LeuCAG_1_+_161411323_161411405@65.86.22,tr
tcgaatcccactcctgacacca

SEQ ID NO: 4807 - DNA, 21 bp, homo sapiens
  tDNA17_LeuCAG_16_+_57333863_57333945@65.85.21,trn
tcgaatcccacttctgacacc

SEQ ID NO: 4808 - DNA, 22 bp, homo sapiens
  tDNA17_LeuCAG_16_+_57333863_57333945@65.86.22,trn
tcgaatcccacttctgacacca

SEQ ID NO: 4809 - DNA, 22 bp, homo sapiens
  tDNA34_ThrAGT_6_+_27130050_27130123@56.77.22,tDNA
tcgaatcccagcggggcctcca

SEQ ID NO: 4810 - DNA, 22 bp, homo sapiens
  tDNA40_ThrAGT_17_-_8042770_8042843@56.77.22,tDNA3
tcgaatcccagcggtgcctcca

SEQ ID NO: 4811 - DNA, 22 bp, homo sapiens
  tDNA127_ThrTGT_6_-_28442329_28442402@56.77.22
tcgaatcccagtagagcctcca

SEQ ID NO: 4812 - DNA, 19 bp, homo sapiens
  tDNA175_SerGCT_6_-_26305718_26305801@66.84.19,trn
tcgaatcccatcctcgtcg

SEQ ID NO: 4813 - DNA, 20 bp, homo sapiens
  tDNA175_SerGCT_6_-_26305718_26305801@66.85.20,trn
tcgaatcccatcctcgtcgc

SEQ ID NO: 4814 - DNA, 21 bp, homo sapiens
  tDNA175_SerGCT_6_-_26305718_26305801@66.86.21,trn
tcgaatcccatcctcgtcgcc

SEQ ID NO: 4815 - DNA, 22 bp, homo sapiens
  tDNA175_SerGCT_6_-_26305718_26305801@66.87.22,trn
tcgaatcccatcctcgtcgcca

SEQ ID NO: 4816 - DNA, 21 bp, homo sapiens
  tDNA106_HisGTG_1_-_149155828_149155899@54.74.21,t
tcgaatccgagtcacggcacc

SEQ ID NO: 4817 - DNA, 22 bp, homo sapiens
  tDNA106_HisGTG_1_-_149155828_149155899@54.75.22,t
tcgaatccgagtcacggcacca

SEQ ID NO: 4818 - DNA, 21 bp, homo sapiens
  tDNA14_TyrGTA_6_+_26569086_26569176@55.75.21,tDNA
tcgaatccggctcgaaggacc

SEQ ID NO: 4819 - DNA, 22 bp, homo sapiens
  tDNA14_TyrGTA_6_+_26569086_26569176@55.76.22,tDNA
tcgaatccggctcgaaggacca

SEQ ID NO: 4820 - DNA, 22 bp, homo sapiens
  tDNA16_TyrGTA_6_+_26577332_26577420@55.76.22,tDNA
tcgaatccggctcggaggacca

SEQ ID NO: 4821 - DNA, 22 bp, homo sapiens
  tDNA145_SerAGA_6_-_27521192_27521273@64.85.22,trn
tcgaatcctgccgactacgcca

SEQ ID NO: 4822 - DNA, 22 bp, homo sapiens
  tDNA41_SerCGA_17_-_8042199_8042280@64.85.22
tcgaatcctgctcacagcgcca

SEQ ID NO: 4823 - DNA, 22 bp, homo sapiens
  tDNA2_SerCGA_12_+_56584148_56584229@64.85.22
tcgaatcctgttcgtgacgcca

SEQ ID NO: 4824 - DNA, 22 bp, homo sapiens
  tDNA3_GluTTC_13_-_45492062_45492133@54.75.22,tDNA
tcgactcccggtgtgggaacca

SEQ ID NO: 4825 - DNA, 22 bp, homo sapiens
  tDNA11_ArgACG_3_-_45730491_45730563@55.76.22,tDNA
tcgactcctggctggctcgcca

SEQ ID NO: 4826 - DNA, 22 bp, homo sapiens
  tDNA16_ValTAC_11_-_59318460_59318532@55.76.22,trn
tcgagccccagtggaaccacca

SEQ ID NO: 4827 - DNA, 22 bp, homo sapiens
  tDNA3_ArgTCT_11_+_59318767_59318852@55.76.22,tDNA
tcgagtcccaccagagtcgcca

SEQ ID NO: 4828 - DNA, 22 bp, homo sapiens
  tDNA4_ArgTCG_15_+_89878304_89878376@55.76.22
tcgagtcctgccgcggtcgcca

SEQ ID NO: 4829 - DNA, 20 bp, homo sapiens
  tDNA19_TyrGTA_14_-_21121258_21121351@4.23.20,tDNA
tcgatagctcagctggtaga

SEQ ID NO: 4830 - DNA, 22 bp, homo sapiens
  tDNA120_AlaAGC_6_-_28626014_28626085@54.75.22
tcgatccccagcatctccacca

SEQ ID NO: 4831 - DNA, 22 bp, homo sapiens
  tDNA108_AlaAGC_6_-_28763741_28763812@54.75.22
tcgatccccagtacctccacca

SEQ ID NO: 4832 - DNA, 22 bp, homo sapiens
  tDNA107_AlaTGC_6_-_28770577_28770647@53.74.22,trn
tcgatccccgacacctccacca

SEQ ID NO: 4833 - DNA, 22 bp, homo sapiens
  tDNA113_AlaTGC_6_-_28726141_28726212@54.75.22,trn
tcgatccccggcacctccacca

SEQ ID NO: 4834 - DNA, 21 bp, homo sapiens
  tDNA119_AlaCGC_6_-_28641613_28641684@54.74.21,trn
tcgatccccggcatctccacc

SEQ ID NO: 4835 - DNA, 22 bp, homo sapiens
  tDNA119_AlaCGC_6_-_28641613_28641684@54.75.22,trn
tcgatccccggcatctccacca

SEQ ID NO: 4836 - DNA, 22 bp, homo sapiens
  tDNA163_IleAAT_6_-_26745255_26745328@56.77.22,trn
tcgatccccgtactggccacca

SEQ ID NO: 4837 - DNA, 22 bp, homo sapiens
  tDNA13_ValCAC_19_-_4724647_4724719@55.76.22
tcgatcccgggcggaaacacca

SEQ ID NO: 4838 - DNA, 22 bp, homo sapiens
  tDNA15_PheGAA_11_-_59324970_59325042@55.76.22,trn
tcgatcccgggtttcggcacca

SEQ ID NO: 4839 - DNA, 22 bp, homo sapiens
  tDNA3_AlaAGC_2_+_27274082_27274154@55.76.22,tDNA6
tcgatgcccgcatcctccacca

SEQ ID NO: 4840 - DNA, 22 bp, homo sapiens
  tDNA9_AlaAGC_14_+_89445442_89445514@55.76.22,tDNA
tcgatgcccgcattctccacca

SEQ ID NO: 4841 - DNA, 22 bp, homo sapiens
  tDNA18_TyrGTA_14_-_21125623_21125716@55.76.22
tcgattccagctcgaaggacca

SEQ ID NO: 4842 - DNA, 22 bp, homo sapiens
  tDNA44_AspGTC_1_+_161492935_161493006@54.75.22,tr
tcgattccccgacggggagcca

SEQ ID NO: 4843 - DNA, 22 bp, homo sapiens
  tDNA10_GlyTCC_17_+_8124866_8124937@54.75.22,tDNA1
tcgattcccggccaacgcacca

SEQ ID NO: 4844 - DNA, 22 bp, homo sapiens
  tDNA68_GlyGCC_1_-_161493637_161493707@53.74.22,tr
tcgattcccggccaatgcacca

SEQ ID NO: 4845 - DNA, 22 bp, homo sapiens
  tDNA35_GlyGCC_1_+_161413094_161413164@53.74.22,tr
tcgattcccggcccatgcacca

SEQ ID NO: 4846 - DNA, 22 bp, homo sapiens
  tDNA34_GlyCCC_16_-_686736_686806@53.74.22,tDNA27_
tcgattcccgggcggcgcacca

SEQ ID NO: 4847 - DNA, 20 bp, homo sapiens
  tDNA19_TyrGTA_14_-_21121258_21121351@55.74.20,trn
tcgattccggctcgaaggac

SEQ ID NO: 4848 - DNA, 21 bp, homo sapiens
  tDNA19_TyrGTA_14_-_21121258_21121351@55.75.21,trn
tcgattccggctcgaaggacc

SEQ ID NO: 4849 - DNA, 22 bp, homo sapiens
  tDNA19_TyrGTA_14_-_21121258_21121351@55.76.22,trn
tcgattccggctcgaaggacca

SEQ ID NO: 4850 - DNA, 21 bp, homo sapiens
  tDNAMT_SerTGA_MT_-_7446_7514@51.71.21,tDNAlookali
tcgattccttccttttttgcc

SEQ ID NO: 4851 - DNA, 22 bp, homo sapiens
  tDNAMT_SerTGA_MT_-_7446_7514@51.72.22,tDNAlookali
tcgattccttccttttttgcca

SEQ ID NO: 4852 - DNA, 22 bp, homo sapiens
  tDNAMT_GlnTTG_MT_-_4329_4400@54.75.22,tDNAlookali
tcgattctcatagtcctagcca

SEQ ID NO: 4853 - DNA, 22 bp, homo sapiens
  tDNA25_GlyGCC_16_-_70812114_70812184@27.48.22,trn
tcgcctgccacgcgggaggccc

SEQ ID NO: 4854 - DNA, 26 bp, homo sapiens
  tDNA25_GlyGCC_16_-_70812114_70812184@27.52.26,trn
tcgcctgccacgcgggaggcccgggt

SEQ ID NO: 4855 - DNA, 22 bp, homo sapiens
  tDNA52_ProCGG_1_+_167683962_167684033@32.53.22,tr
tcgggtgcgagaggtcccgggt

SEQ ID NO: 4856 - DNA, 23 bp, homo sapiens
  tDNA52_ProCGG_1_+_167683962_167684033@32.54.23,tr
tcgggtgcgagaggtcccgggtt

SEQ ID NO: 4857 - DNA, 22 bp, homo sapiens
  tDNA30_ProCGG_6_+_27059521_27059592@32.53.22
tcgggtgtgagaggtcccgggt

SEQ ID NO: 4858 - DNA, 17 bp, homo sapiens
  tDNA149_LysTTT_6_-_27302769_27302841@16.32.17,trn
tcggtagagcatcagac

SEQ ID NO: 4859 - DNA, 21 bp, homo sapiens
  tDNA149_LysTTT_6_-_27302769_27302841@16.36.21,trn
tcggtagagcatcagactttt

SEQ ID NO: 4860 - DNA, 22 bp, homo sapiens
  tDNA149_LysTTT_6_-_27302769_27302841@16.37.22,trn
tcggtagagcatcagactttta

SEQ ID NO: 4861 - DNA, 16 bp, homo sapiens
  tDNA6_LysCTT_19_-_52425396_52425468@16.31.16,tDNA
tcggtagagcatgaga

SEQ ID NO: 4862 - DNA, 17 bp, homo sapiens
  tDNA6_LysCTT_19_-_52425396_52425468@16.32.17,tDNA
tcggtagagcatgagac

SEQ ID NO: 4863 - DNA, 17 bp, homo sapiens
  tDNA4_LysCTT_18_-_43669271_43669343@16.32.17,tDNA
tcggtagagcatgggac

SEQ ID NO: 4864 - DNA, 22 bp, homo sapiens
  tDNA14_ThrCGT_17_+_29877093_29877164@32.53.22
tcgtaaaccgaagatcgcgggt

SEQ ID NO: 4865 - DNA, 22 bp, homo sapiens
  tDNA106_HisGTG_1_-_149155828_149155899@8.29.22,tr
tcgtatagtggttagtactctg

SEQ ID NO: 4866 - DNA, 23 bp, homo sapiens
  tDNA106_HisGTG_1_-_149155828_149155899@8.30.23,tr
tcgtatagtggttagtactctgc

SEQ ID NO: 4867 - DNA, 24 bp, homo sapiens
  tDNA106_HisGTG_1_-_149155828_149155899@8.31.24,tr
tcgtatagtggttagtactctgcg

SEQ ID NO: 4868 - DNA, 25 bp, homo sapiens
  tDNA111_HisGTG_1_-_147774845_147774916@8.32.25,tr
tcgtatagtggttagtactctgcgt

SEQ ID NO: 4869 - DNA, 27 bp, homo sapiens
  tDNA111_HisGTG_1_-_147774845_147774916@8.34.27,tr
tcgtatagtggttagtactctgcgttg

SEQ ID NO: 4870 - DNA, 18 bp, homo sapiens
  tDNAMT_GluTTC_MT_-_14674_14742@44.61.18,tDNAlooka
tcgtggttgtagtccgtg

SEQ ID NO: 4871 - DNA, 19 bp, homo sapiens
  tDNAMT_GluTTC_MT_-_14674_14742@44.62.19,tDNAlooka
tcgtggttgtagtccgtgc

SEQ ID NO: 4872 - DNA, 20 bp, homo sapiens
  tDNAMT_GluTTC_MT_-_14674_14742@44.63.20,tDNAlooka
tcgtggttgtagtccgtgcg

SEQ ID NO: 4873 - DNA, 21 bp, homo sapiens
  tDNAMT_GluTTC_MT_-_14674_14742@44.64.21,tDNAlooka
tcgtggttgtagtccgtgcga

SEQ ID NO: 4874 - DNA, 22 bp, homo sapiens
  tDNAMT_GluTTC_MT_-_14674_14742@44.65.22,tDNAlooka
tcgtggttgtagtccgtgcgag

SEQ ID NO: 4875 - DNA, 23 bp, homo sapiens
  tDNAMT_GluTTC_MT_-_14674_14742@44.66.23,tDNAlooka
tcgtggttgtagtccgtgcgaga

SEQ ID NO: 4876 - DNA, 24 bp, homo sapiens
  tDNAMT_GluTTC_MT_-_14674_14742@44.67.24,tDNAlooka
tcgtggttgtagtccgtgcgagaa

SEQ ID NO: 4877 - DNA, 25 bp, homo sapiens
  tDNAMT_GluTTC_MT_-_14674_14742@44.68.25,tDNAlooka
tcgtggttgtagtccgtgcgagaat

SEQ ID NO: 4878 - DNA, 26 bp, homo sapiens
  tDNAMT_GluTTC_MT_-_14674_14742@44.69.26,tDNAlooka
tcgtggttgtagtccgtgcgagaata

SEQ ID NO: 4879 - DNA, 27 bp, homo sapiens
  tDNAMT_GluTTC_MT_-_14674_14742@44.70.27,tDNAlooka
tcgtggttgtagtccgtgcgagaatac

SEQ ID NO: 4880 - DNA, 28 bp, homo sapiens
  tDNAMT_GluTTC_MT_-_14674_14742@44.71.28,tDNAlooka
tcgtggttgtagtccgtgcgagaatacc

SEQ ID NO: 4881 - DNA, 29 bp, homo sapiens
  tDNAMT_GluTTC_MT_-_14674_14742@44.72.29,tDNAlooka
tcgtggttgtagtccgtgcgagaatacca

SEQ ID NO: 4882 - DNA, 20 bp, homo sapiens
  tDNA65_ProAGG_1_-_167684725_167684796@4.23.20,trn
tcgttggtctaggggtatga

SEQ ID NO: 4883 - DNA, 23 bp, homo sapiens
  tDNA65_ProAGG_1_-_167684725_167684796@4.26.23,trn
tcgttggtctaggggtatgattc

SEQ ID NO: 4884 - DNA, 24 bp, homo sapiens
  tDNA65_ProAGG_1_-_167684725_167684796@4.27.24,trn
tcgttggtctaggggtatgattct

SEQ ID NO: 4885 - DNA, 27 bp, homo sapiens
  tDNA65_ProAGG_1_-_167684725_167684796@4.30.27,trn
tcgttggtctaggggtatgattctcgc

SEQ ID NO: 4886 - DNA, 21 bp, homo sapiens
  tDNAMT_SerGCT_MT_+_12207_12265@39.59.21
tctaacaacatggctttctca

SEQ ID NO: 4887 - DNA, 22 bp, homo sapiens
  tDNAMT_SerGCT_MT_+_12207_12265@39.60.22
tctaacaacatggctttctcac

SEQ ID NO: 4888 - DNA, 23 bp, homo sapiens
  tDNAMT_SerGCT_MT_+_12207_12265@39.61.23
tctaacaacatggctttctcacc

SEQ ID NO: 4889 - DNA, 24 bp, homo sapiens
  tDNAMT_SerGCT_MT_+_12207_12265@39.62.24
tctaacaacatggctttctcacca

SEQ ID NO: 4890 - DNA, 20 bp, homo sapiens
  tDNA3_GluTTC_13_-_45492062_45492133@11.30.20,tDNA
tctagcggttaggattcctg

SEQ ID NO: 4891 - DNA, 21 bp, homo sapiens
  tDNA3_GluTTC_13_-_45492062_45492133@11.31.21,tDNA
tctagcggttaggattcctgg

SEQ ID NO: 4892 - DNA, 20 bp, homo sapiens
  tDNA12_ProTGG_11_-_75946869_75946940@11.30.20
tctaggggtatgattctcgg

SEQ ID NO: 4893 - DNA, 22 bp, homo sapiens
  tDNA25_GluCTC_2_-_71273488_71273560@11.32.22,tDNA
tctagtggttaggattcggcgc

SEQ ID NO: 4894 - DNA, 17 bp, homo sapiens
  tDNA59_GluCTC_1_+_249168447_249168518@33.49.17,tr
tctcaccgccgcggccc

SEQ ID NO: 4895 - DNA, 24 bp, homo sapiens
  tDNA21_MetCAT_6_+_26701712_26701784@31.54.24,tDNA
tctcataatctgaaggtcctgagt

SEQ ID NO: 4896 - DNA, 17 bp, homo sapiens
  tDNAMT_GlnTTG_MT_-_4329_4400@59.75.17,tDNAlookali
tctcatagtcctagcca

SEQ ID NO: 4897 - DNA, 19 bp, homo sapiens
  tDNA58_LeuCAA_1_+_249168054_249168159@45.63.19
tctccggatggaggcgtgg

SEQ ID NO: 4898 - DNA, 20 bp, homo sapiens
  tDNA58_LeuCAA_1_+_249168054_249168159@45.64.20
tctccggatggaggcgtggg

SEQ ID NO: 4899 - DNA, 24 bp, homo sapiens
  tDNA25_GlyGCC_16_-_70812114_70812184@25.48.24,trn
tctcgcctgccacgcgggaggccc

SEQ ID NO: 4900 - DNA, 17 bp, homo sapiens
  tDNA13_ThrTGT_5_-_180618687_180618758@59.75.17,tr
tctcgctggggcctcca

SEQ ID NO: 4901 - DNA, 16 bp, homo sapiens
  tDNA42_GlnCTG_6_+_27263212_27263283@59.74.16,tDNA
tctcggtggaacctcc

SEQ ID NO: 4902 - DNA, 17 bp, homo sapiens
  tDNA42_GlnCTG_6_+_27263212_27263283@59.75.17,tDNA
tctcggtggaacctcca

SEQ ID NO: 4903 - DNA, 17 bp, homo sapiens
  tDNA130_GlnTTG_6_-_27763640_27763711@59.75.17,trn
tctcggtgggacctcca

SEQ ID NO: 4904 - DNA, 30 bp, homo sapiens
  tDNA10_MetCAT_8_-_124169470_124169542@39.68.30
tctgaaggtcgtgagttcgatcctcacacg

SEQ ID NO: 4905 - DNA, 21 bp, homo sapiens
  tDNA131_GlnCTG_6_-_27759135_27759206@33.53.21,trn
tctgaatccagcgatccgagt

SEQ ID NO: 4906 - DNA, 24 bp, homo sapiens
  tDNA6_TrpCCA_12_+_98898030_98898101@26.49.24
tctgactccagatcagaaggctgc

SEQ ID NO: 4907 - DNA, 24 bp, homo sapiens
  tDNA1_TrpCCA_7_+_99067307_99067378@26.49.24,tDNA6
tctgactccagatcagaaggttgc

SEQ ID NO: 4908 - DNA, 24 bp, homo sapiens
  tDNA4_ArgTCG_15_+_89878304_89878376@27.50.24
tctgacttcggatcagaagattgc

SEQ ID NO: 4909 - DNA, 30 bp, homo sapiens
  tDNA12_LysTTT_14_-_74055529_74055601@39.68.30
tctgagggtccagggttcatgtccctgttc

SEQ ID NO: 4910 - DNA, 16 bp, homo sapiens
  tDNA22_GlnCTG_1_+_147800937_147801008@26.41.16,tr
tctggactctgaatcc

SEQ ID NO: 4911 - DNA, 17 bp, homo sapiens
  tDNA22_GlnCTG_1_+_147800937_147801008@26.42.17,tr
tctggactctgaatcca

SEQ ID NO: 4912 - DNA, 18 bp, homo sapiens
  tDNA22_GlnCTG_1_+_147800937_147801008@26.43.18,tr
tctggactctgaatccag

SEQ ID NO: 4913 - DNA, 19 bp, homo sapiens
  tDNA22_GlnCTG_1_+_147800937_147801008@26.44.19,tr
tctggactctgaatccagc

SEQ ID NO: 4914 - DNA, 20 bp, homo sapiens
  tDNA131_GlnCTG_6_-_27759135_27759206@26.45.20,trn
tctggactctgaatccagcg

SEQ ID NO: 4915 - DNA, 21 bp, homo sapiens
  tDNA131_GlnCTG_6_-_27759135_27759206@26.46.21,trn
tctggactctgaatccagcga

SEQ ID NO: 4916 - DNA, 23 bp, homo sapiens
  tDNA131_GlnCTG_6_-_27759135_27759206@26.48.23,trn
tctggactctgaatccagcgatc

SEQ ID NO: 4917 - DNA, 24 bp, homo sapiens
  tDNA131_GlnCTG_6_-_27759135_27759206@26.49.24,trn
tctggactctgaatccagcgatcc

SEQ ID NO: 4918 - DNA, 25 bp, homo sapiens
  tDNA131_GlnCTG_6_-_27759135_27759206@26.50.25,trn
tctggactctgaatccagcgatccg

SEQ ID NO: 4919 - DNA, 26 bp, homo sapiens
  tDNA131_GlnCTG_6_-_27759135_27759206@26.51.26,trn
tctggactctgaatccagcgatccga

SEQ ID NO: 4920 - DNA, 27 bp, homo sapiens
  tDNA131_GlnCTG_6_-_27759135_27759206@26.52.27,trn
tctggactctgaatccagcgatccgag

SEQ ID NO: 4921 - DNA, 28 bp, homo sapiens
  tDNA131_GlnCTG_6_-_27759135_27759206@26.53.28,trn
tctggactctgaatccagcgatccgagt

SEQ ID NO: 4922 - DNA, 17 bp, homo sapiens
  tDNA152_ValCAC_6_-_27248049_27248121@4.20.17
tctgtagtgtagtggtt

SEQ ID NO: 4923 - DNA, 25 bp, homo sapiens
  tDNAMT_ThrTGT_MT_+_15888_15953@45.69.25
tgaaaacctttttccaaggacacca

SEQ ID NO: 4924 - DNA, 16 bp, homo sapiens
  tDNAMT_TyrGTA_MT_-_5826_5891@16.31.16
tgaagcattggactgt

SEQ ID NO: 4925 - DNA, 17 bp, homo sapiens
  tDNAMT_TyrGTA_MT_-_5826_5891@16.32.17
tgaagcattggactgta

SEQ ID NO: 4926 - DNA, 18 bp, homo sapiens
  tDNAMT_TyrGTA_MT_-_5826_5891@16.33.18
tgaagcattggactgtaa

SEQ ID NO: 4927 - DNA, 19 bp, homo sapiens
  tDNAMT_TyrGTA_MT_-_5826_5891@16.34.19
tgaagcattggactgtaaa

SEQ ID NO: 4928 - DNA, 21 bp, homo sapiens
  tDNAMT_TyrGTA_MT_-_5826_5891@16.36.21
tgaagcattggactgtaaatc

SEQ ID NO: 4929 - DNA, 19 bp, homo sapiens
  tDNA131_GlnCTG_6_-_27759135_27759206@35.53.19,trn
tgaatccagcgatccgagt

SEQ ID NO: 4930 - DNA, 21 bp, homo sapiens
  tDNA131_GlnCTG_6_-_27759135_27759206@35.55.21,trn
tgaatccagcgatccgagttc

SEQ ID NO: 4931 - DNA, 22 bp, homo sapiens
  tDNA131_GlnCTG_6_-_27759135_27759206@35.56.22,trn
tgaatccagcgatccgagttca

SEQ ID NO: 4932 - DNA, 24 bp, homo sapiens
  tDNAMT_HisGTG_MT_+_12138_12206@32.55.24
tgaatctgacaacagaggcttacg

SEQ ID NO: 4933 - DNA, 25 bp, homo sapiens
  tDNAMT_HisGTG_MT_+_12138_12206@32.56.25
tgaatctgacaacagaggcttacga

SEQ ID NO: 4934 - DNA, 28 bp, homo sapiens
  tDNAMT_HisGTG_MT_+_12138_12206@32.59.28
tgaatctgacaacagaggcttacgaccc

SEQ ID NO: 4935 - DNA, 29 bp, homo sapiens
  tDNAMT_HisGTG_MT_+_12138_12206@32.60.29
tgaatctgacaacagaggcttacgacccc

SEQ ID NO: 4936 - DNA, 30 bp, homo sapiens
  tDNAMT_HisGTG_MT_+_12138_12206@32.61.30
tgaatctgacaacagaggcttacgacccct

SEQ ID NO: 4937 - DNA, 26 bp, homo sapiens
  tDNA12_CysGCA_3_-_17741392_17741464@29.54.26,tDNA
tgactgcagatcaagaggtccccggt

SEQ ID NO: 4938 - DNA, 26 bp, homo sapiens
  tDNA23_CysGCA_7_-_149072850_149072921@28.53.26,tr
tgactgcagatcaagaggtccctggt

SEQ ID NO: 4939 - DNA, 19 bp, homo sapiens
  tDNAMT_TyrGTA_MT_-_5826_5891@12.30.19
tgagtgaagcattggactg

SEQ ID NO: 4940 - DNA, 20 bp, homo sapiens
  tDNAMT_TyrGTA_MT_-_5826_5891@12.31.20
tgagtgaagcattggactgt

SEQ ID NO: 4941 - DNA, 21 bp, homo sapiens
  tDNAMT_TyrGTA_MT_-_5826_5891@12.32.21
tgagtgaagcattggactgta

SEQ ID NO: 4942 - DNA, 22 bp, homo sapiens
  tDNAMT_TyrGTA_MT_-_5826_5891@12.33.22
tgagtgaagcattggactgtaa

SEQ ID NO: 4943 - DNA, 23 bp, homo sapiens
  tDNAMT_TyrGTA_MT_-_5826_5891@12.34.23
tgagtgaagcattggactgtaaa

SEQ ID NO: 4944 - DNA, 25 bp, homo sapiens
  tDNAMT_TyrGTA_MT_-_5826_5891@12.36.25
tgagtgaagcattggactgtaaatc

SEQ ID NO: 4945 - DNA, 26 bp, homo sapiens
  tDNAMT_TyrGTA_MT_-_5826_5891@12.37.26
tgagtgaagcattggactgtaaatct

SEQ ID NO: 4946 - DNA, 22 bp, homo sapiens
  tDNAMT_ArgTCG_MT_+_10405_10469@47.68.22
tgataatcatatttaccaacca

SEQ ID NO: 4947 - DNA, 18 bp, homo sapiens
  tDNA106_HisGTG_1_-_149155828_149155899@5.22.18,tr
tgatcgtatagtggttag

SEQ ID NO: 4948 - DNA, 19 bp, homo sapiens
  tDNA106_HisGTG_1_-_149155828_149155899@5.23.19,tr
tgatcgtatagtggttagt

SEQ ID NO: 4949 - DNA, 23 bp, homo sapiens
  tDNA106_HisGTG_1_-_149155828_149155899@5.27.23,tr
tgatcgtatagtggttagtactc

SEQ ID NO: 4950 - DNA, 24 bp, homo sapiens
  tDNA106_HisGTG_1_-_149155828_149155899@5.28.24,tr
tgatcgtatagtggttagtactct

SEQ ID NO: 4951 - DNA, 25 bp, homo sapiens
  tDNA106_HisGTG_1_-_149155828_149155899@5.29.25,tr
tgatcgtatagtggttagtactctg

SEQ ID NO: 4952 - DNA, 26 bp, homo sapiens
  tDNA106_HisGTG_1_-_149155828_149155899@5.30.26,tr
tgatcgtatagtggttagtactctgc

SEQ ID NO: 4953 - DNA, 27 bp, homo sapiens
  tDNA106_HisGTG_1_-_149155828_149155899@5.31.27,tr
tgatcgtatagtggttagtactctgcg

SEQ ID NO: 4954 - DNA, 28 bp, homo sapiens
  tDNA111_HisGTG_1_-_147774845_147774916@5.32.28,tr
tgatcgtatagtggttagtactctgcgt

SEQ ID NO: 4955 - DNA, 30 bp, homo sapiens
  tDNA111_HisGTG_1_-_147774845_147774916@5.34.30,tr
tgatcgtatagtggttagtactctgcgttg

SEQ ID NO: 4956 - DNA, 22 bp, homo sapiens
  tDNAMT_LeuTAG_MT_+_12266_12336@52.73.22
tgcaactccaaataaaagtacc

SEQ ID NO: 4957 - DNA, 23 bp, homo sapiens
  tDNAMT_LeuTAG_MT_+_12266_12336@52.74.23
tgcaactccaaataaaagtacca

SEQ ID NO: 4958 - DNA, 21 bp, homo sapiens
  tDNAMT_TrpTCA_MT_+_5512_5579@51.71.21,tDNAlookali
tgcaatacttaatttctgcca

SEQ ID NO: 4959 - DNA, 21 bp, homo sapiens
  tDNA25_GlyGCC_16_-_70812114_70812184@32.52.21,trn
tgccacgcgggaggcccgggt

SEQ ID NO: 4960 - DNA, 23 bp, homo sapiens
  tDNA106_HisGTG_1_-_149155828_149155899@-1T.22.23
tgccatgatcgtatagtggttag

SEQ ID NO: 4961 - DNA, 24 bp, homo sapiens
  tDNA106_HisGTG_1_-_149155828_149155899@-1T.23.24
tgccatgatcgtatagtggttagt

SEQ ID NO: 4962 - DNA, 17 bp, homo sapiens
  tDNAMT_SerGCT_MT_+_12207_12265@29.45.17
tgcccccatgtctaaca

SEQ ID NO: 4963 - DNA, 19 bp, homo sapiens
  tDNAMT_SerGCT_MT_+_12207_12265@29.47.19
tgcccccatgtctaacaac

SEQ ID NO: 4964 - DNA, 24 bp, homo sapiens
  tDNAMT_SerGCT_MT_+_12207_12265@29.52.24
tgcccccatgtctaacaacatggc

SEQ ID NO: 4965 - DNA, 25 bp, homo sapiens
  tDNAMT_SerGCT_MT_+_12207_12265@29.53.25
tgcccccatgtctaacaacatggct

SEQ ID NO: 4966 - DNA, 30 bp, homo sapiens
  tDNAMT_SerGCT_MT_+_12207_12265@29.58.30
tgcccccatgtctaacaacatggctttctc

SEQ ID NO: 4967 - DNA, 17 bp, homo sapiens
  tDNA3_AlaAGC_2_+_27274082_27274154@59.75.17,tDNA6
tgcccgcatcctccacc

SEQ ID NO: 4968 - DNA, 18 bp, homo sapiens
  tDNA3_AlaAGC_2_+_27274082_27274154@59.76.18,tDNA6
tgcccgcatcctccacca

SEQ ID NO: 4969 - DNA, 18 bp, homo sapiens
  tDNA9_AlaAGC_14_+_89445442_89445514@59.76.18,tDNA
tgcccgcattctccacca

SEQ ID NO: 4970 - DNA, 17 bp, homo sapiens
  tDNA111_HisGTG_1_-_147774845_147774916@-1T.16.17,
tgccgtgatcgtatagt

SEQ ID NO: 4971 - DNA, 18 bp, homo sapiens
  tDNA111_HisGTG_1_-_147774845_147774916@-1T.17.18,
tgccgtgatcgtatagtg

SEQ ID NO: 4972 - DNA, 19 bp, homo sapiens
  tDNA111_HisGTG_1_-_147774845_147774916@-1T.18.19,
tgccgtgatcgtatagtgg

SEQ ID NO: 4973 - DNA, 20 bp, homo sapiens
  tDNA111_HisGTG_1_-_147774845_147774916@-1T.19.20,
tgccgtgatcgtatagtggt

SEQ ID NO: 4974 - DNA, 21 bp, homo sapiens
  tDNA111_HisGTG_1_-_147774845_147774916@-1T.20.21,
tgccgtgatcgtatagtggtt

SEQ ID NO: 4975 - DNA, 22 bp, homo sapiens
  tDNA111_HisGTG_1_-_147774845_147774916@-1T.21.22,
tgccgtgatcgtatagtggtta

SEQ ID NO: 4976 - DNA, 23 bp, homo sapiens
  tDNA111_HisGTG_1_-_147774845_147774916@-1T.22.23,
tgccgtgatcgtatagtggttag

SEQ ID NO: 4977 - DNA, 24 bp, homo sapiens
  tDNA111_HisGTG_1_-_147774845_147774916@-1T.23.24,
tgccgtgatcgtatagtggttagt

SEQ ID NO: 4978 - DNA, 25 bp, homo sapiens
  tDNA111_HisGTG_1_-_147774845_147774916@-1T.24.25,
tgccgtgatcgtatagtggttagta

SEQ ID NO: 4979 - DNA, 26 bp, homo sapiens
  tDNA111_HisGTG_1_-_147774845_147774916@-1T.25.26,
tgccgtgatcgtatagtggttagtac

SEQ ID NO: 4980 - DNA, 27 bp, homo sapiens
  tDNA111_HisGTG_1_-_147774845_147774916@-1T.26.27,
tgccgtgatcgtatagtggttagtact

SEQ ID NO: 4981 - DNA, 28 bp, homo sapiens
  tDNA111_HisGTG_1_-_147774845_147774916@-1T.27.28,
tgccgtgatcgtatagtggttagtactc

SEQ ID NO: 4982 - DNA, 29 bp, homo sapiens
  tDNA111_HisGTG_1_-_147774845_147774916@-1T.28.29,
tgccgtgatcgtatagtggttagtactct

SEQ ID NO: 4983 - DNA, 30 bp, homo sapiens
  tDNA111_HisGTG_1_-_147774845_147774916@-1T.29.30,
tgccgtgatcgtatagtggttagtactctg

SEQ ID NO: 4984 - DNA, 22 bp, homo sapiens
  tDNA82_GlyTCC_1_-_161409961_161410032@29.50.22,tr
tgccttccaagcagttgacccg

SEQ ID NO: 4985 - DNA, 23 bp, homo sapiens
  tDNA82_GlyTCC_1_-_161409961_161410032@29.51.23,tr
tgccttccaagcagttgacccgg

SEQ ID NO: 4986 - DNA, 20 bp, homo sapiens
  tDNAMT_SerGCT_MT_+_12207_12265@19.38.20
tgctaactcatgcccccatg

SEQ ID NO: 4987 - DNA, 17 bp, homo sapiens
  tDNA175_SerGCT_6_-_26305718_26305801@35.51.17,trn
tgctaatccattgtgct

SEQ ID NO: 4988 - DNA, 21 bp, homo sapiens
  tDNA8_SerGCT_11_+_66115591_66115672@33.53.21
tgctaatccattgtgctttgc

SEQ ID NO: 4989 - DNA, 20 bp, homo sapiens
  tDNAMT_ProTGG_MT_-_15956_16023@36.55.20
tgctaatggtggagttaaag

SEQ ID NO: 4990 - DNA, 22 bp, homo sapiens
  tDNAMT_ProTGG_MT_-_15956_16023@36.57.22
tgctaatggtggagttaaagac

SEQ ID NO: 4991 - DNA, 17 bp, homo sapiens
  tDNA3_GlnCTG_12_+_74851182_74851254@28.44.17,tDNA
tggactctgaatccagc

SEQ ID NO: 4992 - DNA, 21 bp, homo sapiens
  tDNA131_GlnCTG_6_-_27759135_27759206@28.48.21,trn
tggactctgaatccagcgatc

SEQ ID NO: 4993 - DNA, 23 bp, homo sapiens
  tDNA131_GlnCTG_6_-_27759135_27759206@28.50.23,trn
tggactctgaatccagcgatccg

SEQ ID NO: 4994 - DNA, 24 bp, homo sapiens
  tDNA131_GlnCTG_6_-_27759135_27759206@28.51.24,trn
tggactctgaatccagcgatccga

SEQ ID NO: 4995 - DNA, 25 bp, homo sapiens
  tDNA131_GlnCTG_6_-_27759135_27759206@28.52.25,trn
tggactctgaatccagcgatccgag

SEQ ID NO: 4996 - DNA, 26 bp, homo sapiens
  tDNA131_GlnCTG_6_-_27759135_27759206@28.53.26,trn
tggactctgaatccagcgatccgagt

SEQ ID NO: 4997 - DNA, 21 bp, homo sapiens
  tDNAMT_TyrGTA_MT_-_5826_5891@24.44.21
tggactgtaaatctaaagaca

SEQ ID NO: 4998 - DNA, 23 bp, homo sapiens
  tDNA130_GlnTTG_6_-_27763640_27763711@28.50.23,trn
tggactttgaatccagcgatccg

SEQ ID NO: 4999 - DNA, 16 bp, homo sapiens
  tDNA66_LeuCAA_1_-_161581736_161581819@53.68.16,tr
tggaggcgtgggttcg

SEQ ID NO: 5000 - DNA, 24 bp, homo sapiens
  tDNAMT_ProTGG_MT_-_15956_16023@45.68.24
tggagttaaagactttttctctga

SEQ ID NO: 5001 - DNA, 25 bp, homo sapiens
  tDNAMT_ProTGG_MT_-_15956_16023@45.69.25
tggagttaaagactttttctctgac

SEQ ID NO: 5002 - DNA, 26 bp, homo sapiens
  tDNAMT_ProTGG_MT_-_15956_16023@45.70.26
tggagttaaagactttttctctgacc

SEQ ID NO: 5003 - DNA, 27 bp, homo sapiens
  tDNAMT_ProTGG_MT_-_15956_16023@45.71.27
tggagttaaagactttttctctgacca

SEQ ID NO: 5004 - DNA, 21 bp, homo sapiens
  tDNA11_ArgACG_3_-_45730491_45730563@16.36.21,tDNA
tggataacgcgtctgactacg

SEQ ID NO: 5005 - DNA, 22 bp, homo sapiens
  tDNA11_ArgACG_3_-_45730491_45730563@16.37.22,tDNA
tggataacgcgtctgactacgg

SEQ ID NO: 5006 - DNA, 23 bp, homo sapiens
  tDNA11_ArgACG_3_-_45730491_45730563@16.38.23,tDNA
tggataacgcgtctgactacgga

SEQ ID NO: 5007 - DNA, 20 bp, homo sapiens
  tDNA2_ArgTCG_9_+_112960803_112960875@16.35.20,trn
tggataaggcgtctgacttc

SEQ ID NO: 5008 - DNA, 24 bp, homo sapiens
  tDNA2_ArgTCG_9_+_112960803_112960875@16.39.24,trn
tggataaggcgtctgacttcggat

SEQ ID NO: 5009 - DNA, 25 bp, homo sapiens
  tDNA2_ArgTCG_9_+_112960803_112960875@16.40.25,trn
tggataaggcgtctgacttcggatc

SEQ ID NO: 5010 - DNA, 26 bp, homo sapiens
  tDNA32_MetCAT_1_+_153643726_153643797@50.75.26,tr
tggatcgaaaccatcctctgctacca

SEQ ID NO: 5011 - DNA, 18 bp, homo sapiens
  tDNA106_HisGTG_1_-_149155828_149155899@35.52.18,t
tggccgcagcaacctcgg

SEQ ID NO: 5012 - DNA, 21 bp, homo sapiens
  tDNA106_HisGTG_1_-_149155828_149155899@35.55.21,t
tggccgcagcaacctcggttc

SEQ ID NO: 5013 - DNA, 22 bp, homo sapiens
  tDNA106_HisGTG_1_-_149155828_149155899@35.56.22,t
tggccgcagcaacctcggttcg

SEQ ID NO: 5014 - DNA, 23 bp, homo sapiens
  tDNA106_HisGTG_1_-_149155828_149155899@35.57.23,t
tggccgcagcaacctcggttcga

SEQ ID NO: 5015 - DNA, 21 bp, homo sapiens
  tDNAMT_TyrGTA_MT_-_5826_5891@8.28.21
tggctgagtgaagcattggac

SEQ ID NO: 5016 - DNA, 23 bp, homo sapiens
  tDNAMT_TyrGTA_MT_-_5826_5891@8.30.23
tggctgagtgaagcattggactg

SEQ ID NO: 5017 - DNA, 24 bp, homo sapiens
  tDNAMT_TyrGTA_MT_-_5826_5891@8.31.24
tggctgagtgaagcattggactgt

SEQ ID NO: 5018 - DNA, 25 bp, homo sapiens
  tDNAMT_TyrGTA_MT_-_5826_5891@8.32.25
tggctgagtgaagcattggactgta

SEQ ID NO: 5019 - DNA, 26 bp, homo sapiens
  tDNAMT_TyrGTA_MT_-_5826_5891@8.33.26
tggctgagtgaagcattggactgtaa

SEQ ID NO: 5020 - DNA, 27 bp, homo sapiens
  tDNAMT_TyrGTA_MT_-_5826_5891@8.34.27
tggctgagtgaagcattggactgtaaa

SEQ ID NO: 5021 - DNA, 16 bp, homo sapiens
  tDNA35_GlyGCC_1_+_161413094_161413164@4.19.16,trn
tgggtggttcagtggt

SEQ ID NO: 5022 - DNA, 17 bp, homo sapiens
  tDNA35_GlyGCC_1_+_161413094_161413164@4.20.17,trn
tgggtggttcagtggta

SEQ ID NO: 5023 - DNA, 18 bp, homo sapiens
  tDNA35_GlyGCC_1_+_161413094_161413164@4.21.18,trn
tgggtggttcagtggtag

SEQ ID NO: 5024 - DNA, 19 bp, homo sapiens
  tDNA35_GlyGCC_1_+_161413094_161413164@4.22.19,trn
tgggtggttcagtggtaga

SEQ ID NO: 5025 - DNA, 20 bp, homo sapiens
  tDNA35_GlyGCC_1_+_161413094_161413164@4.23.20,trn
tgggtggttcagtggtagaa

SEQ ID NO: 5026 - DNA, 21 bp, homo sapiens
  tDNA35_GlyGCC_1_+_161413094_161413164@4.24.21,trn
tgggtggttcagtggtagaat

SEQ ID NO: 5027 - DNA, 23 bp, homo sapiens
  tDNA35_GlyGCC_1_+_161413094_161413164@4.26.23,trn
tgggtggttcagtggtagaattc

SEQ ID NO: 5028 - DNA, 24 bp, homo sapiens
  tDNA35_GlyGCC_1_+_161413094_161413164@4.27.24,trn
tgggtggttcagtggtagaattct

SEQ ID NO: 5029 - DNA, 25 bp, homo sapiens
  tDNA35_GlyGCC_1_+_161413094_161413164@4.28.25,trn
tgggtggttcagtggtagaattctc

SEQ ID NO: 5030 - DNA, 27 bp, homo sapiens
  tDNA35_GlyGCC_1_+_161413094_161413164@4.30.27,trn
tgggtggttcagtggtagaattctcgc

SEQ ID NO: 5031 - DNA, 28 bp, homo sapiens
  tDNA35_GlyGCC_1_+_161413094_161413164@4.31.28,trn
tgggtggttcagtggtagaattctcgcc

SEQ ID NO: 5032 - DNA, 27 bp, homo sapiens
  tDNA175_SerGCT_6_-_26305718_26305801@61.87.27,trn
tgggttcgaatcccatcctcgtcgcca

SEQ ID NO: 5033 - DNA, 27 bp, homo sapiens
  tDNA23_ArgCCG_17_-_66016013_66016085@50.76.27
tgggttcgagtcccatctgggtcgcca

SEQ ID NO: 5034 - DNA, 19 bp, homo sapiens
  tDNAMT_AsnGTT_MT_-_5657_5729@50.68.19,tDNAlookali
tgggtttaagtcccattgg

SEQ ID NO: 5035 - DNA, 25 bp, homo sapiens
  tDNAMT_AsnGTT_MT_-_5657_5729@50.74.25,tDNAlookali
tgggtttaagtcccattggtctagc

SEQ ID NO: 5036 - DNA, 26 bp, homo sapiens
  tDNAMT_AsnGTT_MT_-_5657_5729@50.75.26,tDNAlookali
tgggtttaagtcccattggtctagcc

SEQ ID NO: 5037 - DNA, 27 bp, homo sapiens
  tDNAMT_AsnGTT_MT_-_5657_5729@50.76.27,tDNAlookali
tgggtttaagtcccattggtctagcca

SEQ ID NO: 5038 - DNA, 16 bp, homo sapiens
  tDNA91_GlyCCC_1_-_149680210_149680280@16.31.16,tr
tggtagaattctcgcc

SEQ ID NO: 5039 - DNA, 17 bp, homo sapiens
  tDNA91_GlyCCC_1_-_149680210_149680280@16.32.17,tr
tggtagaattctcgcct

SEQ ID NO: 5040 - DNA, 19 bp, homo sapiens
  tDNA91_GlyCCC_1_-_149680210_149680280@16.34.19,tr
tggtagaattctcgcctcc

SEQ ID NO: 5041 - DNA, 18 bp, homo sapiens
  tDNA18_GlyGCC_16_+_70822597_70822667@16.33.18,trn
tggtagaattctcgcctg

SEQ ID NO: 5042 - DNA, 19 bp, homo sapiens
  tDNA18_GlyGCC_16_+_70822597_70822667@16.34.19,trn
tggtagaattctcgcctgc

SEQ ID NO: 5043 - DNA, 20 bp, homo sapiens
  tDNA18_GlyGCC_16_+_70822597_70822667@16.35.20,trn
tggtagaattctcgcctgcc

SEQ ID NO: 5044 - DNA, 21 bp, homo sapiens
  tDNA18_GlyGCC_16_+_70822597_70822667@16.36.21,trn
tggtagaattctcgcctgcca

SEQ ID NO: 5045 - DNA, 22 bp, homo sapiens
  tDNA25_GlyGCC_16_-_70812114_70812184@16.37.22,trn
tggtagaattctcgcctgccac

SEQ ID NO: 5046 - DNA, 23 bp, homo sapiens
  tDNA25_GlyGCC_16_-_70812114_70812184@16.38.23,trn
tggtagaattctcgcctgccacg

SEQ ID NO: 5047 - DNA, 24 bp, homo sapiens
  tDNA25_GlyGCC_16_-_70812114_70812184@16.39.24,trn
tggtagaattctcgcctgccacgc

SEQ ID NO: 5048 - DNA, 30 bp, homo sapiens
  tDNA25_GlyGCC_16_-_70812114_70812184@16.45.30,trn
tggtagaattctcgcctgccacgcgggagg

SEQ ID NO: 5049 - DNA, 17 bp, homo sapiens
  tDNA127_CysGCA_1_-_93981834_93981906@17.33.17,trn
tggtagagcatttgact

SEQ ID NO: 5050 - DNA, 19 bp, homo sapiens
  tDNA127_CysGCA_1_-_93981834_93981906@17.35.19,trn
tggtagagcatttgactgc

SEQ ID NO: 5051 - DNA, 24 bp, homo sapiens
  tDNA127_CysGCA_1_-_93981834_93981906@17.40.24,trn
tggtagagcatttgactgcagatc

SEQ ID NO: 5052 - DNA, 25 bp, homo sapiens
  tDNA127_CysGCA_1_-_93981834_93981906@17.41.25,trn
tggtagagcatttgactgcagatca

SEQ ID NO: 5053 - DNA, 20 bp, homo sapiens
  tDNA19_TyrGTA_14_-_21121258_21121351@17.36.20,trn
tggtagagcggaggactgta

SEQ ID NO: 5054 - DNA, 21 bp, homo sapiens
  tDNA19_TyrGTA_14_-_21121258_21121351@17.37.21,trn
tggtagagcggaggactgtag

SEQ ID NO: 5055 - DNA, 16 bp, homo sapiens
  tDNAMT_GluTTC_MT_-_14674_14742@41.56.16,tDNAlooka
tggtcgtggttgtagt

SEQ ID NO: 5056 - DNA, 17 bp, homo sapiens
  tDNAMT_GluTTC_MT_-_14674_14742@41.57.17,tDNAlooka
tggtcgtggttgtagtc

SEQ ID NO: 5057 - DNA, 18 bp, homo sapiens
  tDNAMT_GluTTC_MT_-_14674_14742@41.58.18,tDNAlooka
tggtcgtggttgtagtcc

SEQ ID NO: 5058 - DNA, 19 bp, homo sapiens
  tDNAMT_GluTTC_MT_-_14674_14742@41.59.19,tDNAlooka
tggtcgtggttgtagtccg

SEQ ID NO: 5059 - DNA, 20 bp, homo sapiens
  tDNAMT_GluTTC_MT_-_14674_14742@41.60.20,tDNAlooka
tggtcgtggttgtagtccgt

SEQ ID NO: 5060 - DNA, 21 bp, homo sapiens
  tDNAMT_GluTTC_MT_-_14674_14742@41.61.21,tDNAlooka
tggtcgtggttgtagtccgtg

SEQ ID NO: 5061 - DNA, 22 bp, homo sapiens
  tDNAMT_GluTTC_MT_-_14674_14742@41.62.22,tDNAlooka
tggtcgtggttgtagtccgtgc

SEQ ID NO: 5062 - DNA, 23 bp, homo sapiens
  tDNAMT_GluTTC_MT_-_14674_14742@41.63.23,tDNAlooka
tggtcgtggttgtagtccgtgcg

SEQ ID NO: 5063 - DNA, 24 bp, homo sapiens
  tDNAMT_GluTTC_MT_-_14674_14742@41.64.24,tDNAlooka
tggtcgtggttgtagtccgtgcga

SEQ ID NO: 5064 - DNA, 25 bp, homo sapiens
  tDNAMT_GluTTC_MT_-_14674_14742@41.65.25,tDNAlooka
tggtcgtggttgtagtccgtgcgag

SEQ ID NO: 5065 - DNA, 26 bp, homo sapiens
  tDNAMT_GluTTC_MT_-_14674_14742@41.66.26,tDNAlooka
tggtcgtggttgtagtccgtgcgaga

SEQ ID NO: 5066 - DNA, 27 bp, homo sapiens
  tDNAMT_GluTTC_MT_-_14674_14742@41.67.27,tDNAlooka
tggtcgtggttgtagtccgtgcgagaa

SEQ ID NO: 5067 - DNA, 28 bp, homo sapiens
  tDNAMT_GluTTC_MT_-_14674_14742@41.68.28,tDNAlooka
tggtcgtggttgtagtccgtgcgagaat

SEQ ID NO: 5068 - DNA, 29 bp, homo sapiens
  tDNAMT_GluTTC_MT_-_14674_14742@41.69.29,tDNAlooka
tggtcgtggttgtagtccgtgcgagaata

SEQ ID NO: 5069 - DNA, 30 bp, homo sapiens
  tDNAMT_GluTTC_MT_-_14674_14742@41.70.30,tDNAlooka
tggtcgtggttgtagtccgtgcgagaatac

SEQ ID NO: 5070 - DNA, 23 bp, homo sapiens
  tDNA141_LeuCAA_6_-_27570348_27570454@16.38.23,trn
tggtctaaggcgccagactcaag

SEQ ID NO: 5071 - DNA, 17 bp, homo sapiens
  tDNA27_LeuTAG_16_-_22207032_22207113@16.32.17
tggtctaaggcgctgga

SEQ ID NO: 5072 - DNA, 18 bp, homo sapiens
  tDNA27_LeuTAG_16_-_22207032_22207113@16.33.18
tggtctaaggcgctggat

SEQ ID NO: 5073 - DNA, 19 bp, homo sapiens
  tDNA27_LeuTAG_16_-_22207032_22207113@16.34.19
tggtctaaggcgctggatt

SEQ ID NO: 5074 - DNA, 22 bp, homo sapiens
  tDNA27_LeuTAG_16_-_22207032_22207113@16.37.22
tggtctaaggcgctggatttag

SEQ ID NO: 5075 - DNA, 20 bp, homo sapiens
  tDNA3_GluTTC_13_-_45492062_45492133@8.27.20,tDNA1
tggtctagcggttaggattc

SEQ ID NO: 5076 - DNA, 21 bp, homo sapiens
  tDNA3_GluTTC_13_-_45492062_45492133@8.28.21,tDNA1
tggtctagcggttaggattcc

SEQ ID NO: 5077 - DNA, 23 bp, homo sapiens
  tDNA3_GluTTC_13_-_45492062_45492133@8.30.23,tDNA1
tggtctagcggttaggattcctg

SEQ ID NO: 5078 - DNA, 24 bp, homo sapiens
  tDNA3_GluTTC_13_-_45492062_45492133@8.31.24,tDNA1
tggtctagcggttaggattcctgg

SEQ ID NO: 5079 - DNA, 25 bp, homo sapiens
  tDNA3_GluTTC_13_-_45492062_45492133@8.32.25,tDNA1
tggtctagcggttaggattcctggt

SEQ ID NO: 5080 - DNA, 29 bp, homo sapiens
  tDNA3_GluTTC_13_-_45492062_45492133@8.36.29,tDNA1
tggtctagcggttaggattcctggttttc

SEQ ID NO: 5081 - DNA, 16 bp, homo sapiens
  tDNA33_ProAGG_16_-_3202609_3202680@8.23.16,tDNA65
tggtctaggggtatga

SEQ ID NO: 5082 - DNA, 19 bp, homo sapiens
  tDNA65_ProAGG_1_-_167684725_167684796@8.26.19,trn
tggtctaggggtatgattc

SEQ ID NO: 5083 - DNA, 23 bp, homo sapiens
  tDNA65_ProAGG_1_-_167684725_167684796@8.30.23,trn
tggtctaggggtatgattctcgc

SEQ ID NO: 5084 - DNA, 24 bp, homo sapiens
  tDNA65_ProAGG_1_-_167684725_167684796@8.31.24,trn
tggtctaggggtatgattctcgct

SEQ ID NO: 5085 - DNA, 23 bp, homo sapiens
  tDNA12_ProTGG_11_-_75946869_75946940@8.30.23
tggtctaggggtatgattctcgg

SEQ ID NO: 5086 - DNA, 24 bp, homo sapiens
  tDNA12_ProTGG_11_-_75946869_75946940@8.31.24
tggtctaggggtatgattctcggt

SEQ ID NO: 5087 - DNA, 22 bp, homo sapiens
  tDNA102_GluTTC_1_-_149278785_149278857@8.29.22,tr
tggtctagtggctaggattcgg

SEQ ID NO: 5088 - DNA, 22 bp, homo sapiens
  tDNA59_GluCTC_1_+_249168447_249168518@8.29.22,trn
tggtctagtggttaggattcgg

SEQ ID NO: 5089 - DNA, 25 bp, homo sapiens
  tDNA59_GluCTC_1_+_249168447_249168518@8.32.25,trn
tggtctagtggttaggattcggcgc

SEQ ID NO: 5090 - DNA, 26 bp, homo sapiens
  tDNA59_GluCTC_1_+_249168447_249168518@8.33.26,trn
tggtctagtggttaggattcggcgct

SEQ ID NO: 5091 - DNA, 27 bp, homo sapiens
  tDNA59_GluCTC_1_+_249168447_249168518@8.34.27,trn
tggtctagtggttaggattcggcgctc

SEQ ID NO: 5092 - DNA, 29 bp, homo sapiens
  tDNA59_GluCTC_1_+_249168447_249168518@8.36.29,trn
tggtctagtggttaggattcggcgctctc

SEQ ID NO: 5093 - DNA, 16 bp, homo sapiens
  tDNA15_GlnCTG_1_+_145963304_145963375@16.31.16,tr
tggtgagcactctgga

SEQ ID NO: 5094 - DNA, 18 bp, homo sapiens
  tDNA15_GlnCTG_1_+_145963304_145963375@16.33.18,tr
tggtgagcactctggact

SEQ ID NO: 5095 - DNA, 19 bp, homo sapiens
  tDNA15_GlnCTG_1_+_145963304_145963375@16.34.19,tr
tggtgagcactctggactc

SEQ ID NO: 5096 - DNA, 16 bp, homo sapiens
  tDNA22_AspGTC_5_-_141773988_141774059@16.31.16,tr
tggtgagtatccccgc

SEQ ID NO: 5097 - DNA, 26 bp, homo sapiens
  tDNAMT_ProTGG_MT_-_15956_16023@42.67.26
tggtggagttaaagactttttctctg

SEQ ID NO: 5098 - DNA, 28 bp, homo sapiens
  tDNAMT_ProTGG_MT_-_15956_16023@42.69.28
tggtggagttaaagactttttctctgac

SEQ ID NO: 5099 - DNA, 29 bp, homo sapiens
  tDNAMT_ProTGG_MT_-_15956_16023@42.70.29
tggtggagttaaagactttttctctgacc

SEQ ID NO: 5100 - DNA, 25 bp, homo sapiens
  tDNA59_GluCTC_1_+_249168447_249168518@5.29.25,trn
tggtggtctagtggttaggattcgg

SEQ ID NO: 5101 - DNA, 26 bp, homo sapiens
  tDNA59_GluCTC_1_+_249168447_249168518@5.30.26,trn
tggtggtctagtggttaggattcggc

SEQ ID NO: 5102 - DNA, 28 bp, homo sapiens
  tDNA59_GluCTC_1_+_249168447_249168518@5.32.28,trn
tggtggtctagtggttaggattcggcgc

SEQ ID NO: 5103 - DNA, 18 bp, homo sapiens
  tDNA91_GlyCCC_1_-_149680210_149680280@5.22.18,trn
tggtggttcagtggtaga

SEQ ID NO: 5104 - DNA, 19 bp, homo sapiens
  tDNA91_GlyCCC_1_-_149680210_149680280@5.23.19,trn
tggtggttcagtggtagaa

SEQ ID NO: 5105 - DNA, 20 bp, homo sapiens
  tDNA91_GlyCCC_1_-_149680210_149680280@5.24.20,trn
tggtggttcagtggtagaat

SEQ ID NO: 5106 - DNA, 25 bp, homo sapiens
  tDNA91_GlyCCC_1_-_149680210_149680280@5.29.25,trn
tggtggttcagtggtagaattctcg

SEQ ID NO: 5107 - DNA, 26 bp, homo sapiens
  tDNA91_GlyCCC_1_-_149680210_149680280@5.30.26,trn
tggtggttcagtggtagaattctcgc

SEQ ID NO: 5108 - DNA, 27 bp, homo sapiens
  tDNA91_GlyCCC_1_-_149680210_149680280@5.31.27,trn
tggtggttcagtggtagaattctcgcc

SEQ ID NO: 5109 - DNA, 23 bp, homo sapiens
  tDNA15_GlnCTG_1_+_145963304_145963375@8.30.23,trn
tggtgtaatggtgagcactctgg

SEQ ID NO: 5110 - DNA, 24 bp, homo sapiens
  tDNA15_GlnCTG_1_+_145963304_145963375@8.31.24,trn
tggtgtaatggtgagcactctgga

SEQ ID NO: 5111 - DNA, 26 bp, homo sapiens
  tDNA15_GlnCTG_1_+_145963304_145963375@8.33.26,trn
tggtgtaatggtgagcactctggact

SEQ ID NO: 5112 - DNA, 27 bp, homo sapiens
  tDNA15_GlnCTG_1_+_145963304_145963375@8.34.27,trn
tggtgtaatggtgagcactctggactc

SEQ ID NO: 5113 - DNA, 23 bp, homo sapiens
  tDNA42_GlnCTG_6_+_27263212_27263283@8.30.23,tDNA1
tggtgtaatggttagcactctgg

SEQ ID NO: 5114 - DNA, 24 bp, homo sapiens
  tDNA42_GlnCTG_6_+_27263212_27263283@8.31.24,tDNA1
tggtgtaatggttagcactctgga

SEQ ID NO: 5115 - DNA, 25 bp, homo sapiens
  tDNA42_GlnCTG_6_+_27263212_27263283@8.32.25,tDNA1
tggtgtaatggttagcactctggac

SEQ ID NO: 5116 - DNA, 26 bp, homo sapiens
  tDNA42_GlnCTG_6_+_27263212_27263283@8.33.26,tDNA1
tggtgtaatggttagcactctggact

SEQ ID NO: 5117 - DNA, 27 bp, homo sapiens
  tDNA42_GlnCTG_6_+_27263212_27263283@8.34.27,tDNA1
tggtgtaatggttagcactctggactc

SEQ ID NO: 5118 - DNA, 28 bp, homo sapiens
  tDNA42_GlnCTG_6_+_27263212_27263283@8.35.28,tDNA1
tggtgtaatggttagcactctggactct

SEQ ID NO: 5119 - DNA, 29 bp, homo sapiens
  tDNA42_GlnCTG_6_+_27263212_27263283@8.36.29,tDNA1
tggtgtaatggttagcactctggactctg

SEQ ID NO: 5120 - DNA, 29 bp, homo sapiens
  tDNA130_GlnTTG_6_-_27763640_27763711@8.36.29,tDNA
tggtgtaatggttagcactctggactttg

SEQ ID NO: 5121 - DNA, 17 bp, homo sapiens
  tDNA155_LeuTAA_6_-_27198334_27198416@16.32.17,trn
tggttaaggcgttggac

SEQ ID NO: 5122 - DNA, 18 bp, homo sapiens
  tDNA155_LeuTAA_6_-_27198334_27198416@16.33.18,trn
tggttaaggcgttggact

SEQ ID NO: 5123 - DNA, 16 bp, homo sapiens
  tDNA42_GlnCTG_6_+_27263212_27263283@16.31.16,tDNA
tggttagcactctgga

SEQ ID NO: 5124 - DNA, 17 bp, homo sapiens
  tDNA42_GlnCTG_6_+_27263212_27263283@16.32.17,tDNA
tggttagcactctggac

SEQ ID NO: 5125 - DNA, 18 bp, homo sapiens
  tDNA42_GlnCTG_6_+_27263212_27263283@16.33.18,tDNA
tggttagcactctggact

SEQ ID NO: 5126 - DNA, 19 bp, homo sapiens
  tDNA42_GlnCTG_6_+_27263212_27263283@16.34.19,tDNA
tggttagcactctggactc

SEQ ID NO: 5127 - DNA, 20 bp, homo sapiens
  tDNA42_GlnCTG_6_+_27263212_27263283@16.35.20,tDNA
tggttagcactctggactct

SEQ ID NO: 5128 - DNA, 21 bp, homo sapiens
  tDNA42_GlnCTG_6_+_27263212_27263283@16.36.21,tDNA
tggttagcactctggactctg

SEQ ID NO: 5129 - DNA, 22 bp, homo sapiens
  tDNA42_GlnCTG_6_+_27263212_27263283@16.37.22,tDNA
tggttagcactctggactctga

SEQ ID NO: 5130 - DNA, 23 bp, homo sapiens
  tDNA42_GlnCTG_6_+_27263212_27263283@16.38.23,tDNA
tggttagcactctggactctgaa

SEQ ID NO: 5131 - DNA, 24 bp, homo sapiens
  tDNA42_GlnCTG_6_+_27263212_27263283@16.39.24,tDNA
tggttagcactctggactctgaat

SEQ ID NO: 5132 - DNA, 25 bp, homo sapiens
  tDNA42_GlnCTG_6_+_27263212_27263283@16.40.25,tDNA
tggttagcactctggactctgaatc

SEQ ID NO: 5133 - DNA, 26 bp, homo sapiens
  tDNA42_GlnCTG_6_+_27263212_27263283@16.41.26,tDNA
tggttagcactctggactctgaatcc

SEQ ID NO: 5134 - DNA, 27 bp, homo sapiens
  tDNA146_GlnCTG_6_-_27515531_27515602@16.42.27,trn
tggttagcactctggactctgaatcca

SEQ ID NO: 5135 - DNA, 29 bp, homo sapiens
  tDNA146_GlnCTG_6_-_27515531_27515602@16.44.29,trn
tggttagcactctggactctgaatccagc

SEQ ID NO: 5136 - DNA, 20 bp, homo sapiens
  tDNA130_GlnTTG_6_-_27763640_27763711@16.35.20,trn
tggttagcactctggacttt

SEQ ID NO: 5137 - DNA, 21 bp, homo sapiens
  tDNA130_GlnTTG_6_-_27763640_27763711@16.36.21,trn
tggttagcactctggactttg

SEQ ID NO: 5138 - DNA, 22 bp, homo sapiens
  tDNA130_GlnTTG_6_-_27763640_27763711@16.37.22,trn
tggttagcactctggactttga

SEQ ID NO: 5139 - DNA, 23 bp, homo sapiens
  tDNA130_GlnTTG_6_-_27763640_27763711@16.38.23,trn
tggttagcactctggactttgaa

SEQ ID NO: 5140 - DNA, 24 bp, homo sapiens
  tDNA130_GlnTTG_6_-_27763640_27763711@16.39.24,trn
tggttagcactctggactttgaat

SEQ ID NO: 5141 - DNA, 25 bp, homo sapiens
  tDNA130_GlnTTG_6_-_27763640_27763711@16.40.25,trn
tggttagcactctggactttgaatc

SEQ ID NO: 5142 - DNA, 16 bp, homo sapiens
  tDNA25_GluCTC_2_-_71273488_71273560@16.31.16,tDNA
tggttaggattcggcg

SEQ ID NO: 5143 - DNA, 17 bp, homo sapiens
  tDNA25_GluCTC_2_-_71273488_71273560@16.32.17,tDNA
tggttaggattcggcgc

SEQ ID NO: 5144 - DNA, 18 bp, homo sapiens
  tDNA25_GluCTC_2_-_71273488_71273560@16.33.18,tDNA
tggttaggattcggcgct

SEQ ID NO: 5145 - DNA, 19 bp, homo sapiens
  tDNA25_GluCTC_2_-_71273488_71273560@16.34.19,tDNA
tggttaggattcggcgctc

SEQ ID NO: 5146 - DNA, 20 bp, homo sapiens
  tDNA25_GluCTC_2_-_71273488_71273560@16.35.20,tDNA
tggttaggattcggcgctct

SEQ ID NO: 5147 - DNA, 21 bp, homo sapiens
  tDNA25_GluCTC_2_-_71273488_71273560@16.36.21,tDNA
tggttaggattcggcgctctc

SEQ ID NO: 5148 - DNA, 22 bp, homo sapiens
  tDNA25_GluCTC_2_-_71273488_71273560@16.37.22,tDNA
tggttaggattcggcgctctca

SEQ ID NO: 5149 - DNA, 23 bp, homo sapiens
  tDNA10_GluCTC_3_-_103879524_103879595@16.38.23,tr
tggttaggattcggcgctctcac

SEQ ID NO: 5150 - DNA, 24 bp, homo sapiens
  tDNA10_GluCTC_3_-_103879524_103879595@16.39.24,tr
tggttaggattcggcgctctcacc

SEQ ID NO: 5151 - DNA, 26 bp, homo sapiens
  tDNA10_GluCTC_3_-_103879524_103879595@16.41.26,tr
tggttaggattcggcgctctcaccgc

SEQ ID NO: 5152 - DNA, 27 bp, homo sapiens
  tDNA10_GluCTC_3_-_103879524_103879595@16.42.27,tr
tggttaggattcggcgctctcaccgcc

SEQ ID NO: 5153 - DNA, 16 bp, homo sapiens
  tDNA106_HisGTG_1_-_149155828_149155899@16.31.16,t
tggttagtactctgcg

SEQ ID NO: 5154 - DNA, 17 bp, homo sapiens
  tDNA111_HisGTG_1_-_147774845_147774916@16.32.17,t
tggttagtactctgcgt

SEQ ID NO: 5155 - DNA, 18 bp, homo sapiens
  tDNA111_HisGTG_1_-_147774845_147774916@16.33.18,t
tggttagtactctgcgtt

SEQ ID NO: 5156 - DNA, 19 bp, homo sapiens
  tDNA111_HisGTG_1_-_147774845_147774916@16.34.19,t
tggttagtactctgcgttg

SEQ ID NO: 5157 - DNA, 20 bp, homo sapiens
  tDNA111_HisGTG_1_-_147774845_147774916@16.35.20,t
tggttagtactctgcgttgt

SEQ ID NO: 5158 - DNA, 21 bp, homo sapiens
  tDNA111_HisGTG_1_-_147774845_147774916@16.36.21,t
tggttagtactctgcgttgtg

SEQ ID NO: 5159 - DNA, 22 bp, homo sapiens
  tDNA111_HisGTG_1_-_147774845_147774916@16.37.22,t
tggttagtactctgcgttgtgg

SEQ ID NO: 5160 - DNA, 23 bp, homo sapiens
  tDNA111_HisGTG_1_-_147774845_147774916@16.38.23,t
tggttagtactctgcgttgtggc

SEQ ID NO: 5161 - DNA, 24 bp, homo sapiens
  tDNA111_HisGTG_1_-_147774845_147774916@16.39.24,t
tggttagtactctgcgttgtggcc

SEQ ID NO: 5162 - DNA, 26 bp, homo sapiens
  tDNA111_HisGTG_1_-_147774845_147774916@16.41.26,t
tggttagtactctgcgttgtggccgc

SEQ ID NO: 5163 - DNA, 27 bp, homo sapiens
  tDNA111_HisGTG_1_-_147774845_147774916@16.42.27,t
tggttagtactctgcgttgtggccgca

SEQ ID NO: 5164 - DNA, 22 bp, homo sapiens
  tDNAMT_MetCAT_MT_+_4402_4469@47.68.22
tggttatacccttcccgtacta

SEQ ID NO: 5165 - DNA, 24 bp, homo sapiens
  tDNAMT_MetCAT_MT_+_4402_4469@47.70.24
tggttatacccttcccgtactacc

SEQ ID NO: 5166 - DNA, 25 bp, homo sapiens
  tDNAMT_MetCAT_MT_+_4402_4469@47.71.25
tggttatacccttcccgtactacca

SEQ ID NO: 5167 - DNA, 17 bp, homo sapiens
  tDNA136_ValAAC_6_-_27648885_27648957@16.32.17,trn
tggttatcacgttcgcc

SEQ ID NO: 5168 - DNA, 21 bp, homo sapiens
  tDNA157_ValCAC_6_-_27173867_27173939@16.36.21,trn
tggttatcacgttcgcctcac

SEQ ID NO: 5169 - DNA, 16 bp, homo sapiens
  tDNA91_GlyCCC_1_-_149680210_149680280@8.23.16,trn
tggttcagtggtagaa

SEQ ID NO: 5170 - DNA, 17 bp, homo sapiens
  tDNA91_GlyCCC_1_-_149680210_149680280@8.24.17,trn
tggttcagtggtagaat

SEQ ID NO: 5171 - DNA, 19 bp, homo sapiens
  tDNA91_GlyCCC_1_-_149680210_149680280@8.26.19,trn
tggttcagtggtagaattc

SEQ ID NO: 5172 - DNA, 20 bp, homo sapiens
  tDNA91_GlyCCC_1_-_149680210_149680280@8.27.20,trn
tggttcagtggtagaattct

SEQ ID NO: 5173 - DNA, 21 bp, homo sapiens
  tDNA91_GlyCCC_1_-_149680210_149680280@8.28.21,trn
tggttcagtggtagaattctc

SEQ ID NO: 5174 - DNA, 22 bp, homo sapiens
  tDNA91_GlyCCC_1_-_149680210_149680280@8.29.22,trn
tggttcagtggtagaattctcg

SEQ ID NO: 5175 - DNA, 23 bp, homo sapiens
  tDNA91_GlyCCC_1_-_149680210_149680280@8.30.23,trn
tggttcagtggtagaattctcgc

SEQ ID NO: 5176 - DNA, 24 bp, homo sapiens
  tDNA91_GlyCCC_1_-_149680210_149680280@8.31.24,trn
tggttcagtggtagaattctcgcc

SEQ ID NO: 5177 - DNA, 25 bp, homo sapiens
  tDNA91_GlyCCC_1_-_149680210_149680280@8.32.25,trn
tggttcagtggtagaattctcgcct

SEQ ID NO: 5178 - DNA, 26 bp, homo sapiens
  tDNA18_GlyGCC_16_+_70822597_70822667@8.33.26,tDNA
tggttcagtggtagaattctcgcctg

SEQ ID NO: 5179 - DNA, 27 bp, homo sapiens
  tDNA18_GlyGCC_16_+_70822597_70822667@8.34.27,tDNA
tggttcagtggtagaattctcgcctgc

SEQ ID NO: 5180 - DNA, 16 bp, homo sapiens
  tDNAMT_GluTTC_MT_-_14674_14742@47.62.16,tDNAlooka
tggttgtagtccgtgc

SEQ ID NO: 5181 - DNA, 17 bp, homo sapiens
  tDNAMT_GluTTC_MT_-_14674_14742@47.63.17,tDNAlooka
tggttgtagtccgtgcg

SEQ ID NO: 5182 - DNA, 18 bp, homo sapiens
  tDNAMT_GluTTC_MT_-_14674_14742@47.64.18,tDNAlooka
tggttgtagtccgtgcga

SEQ ID NO: 5183 - DNA, 19 bp, homo sapiens
  tDNAMT_GluTTC_MT_-_14674_14742@47.65.19,tDNAlooka
tggttgtagtccgtgcgag

SEQ ID NO: 5184 - DNA, 20 bp, homo sapiens
  tDNAMT_GluTTC_MT_-_14674_14742@47.66.20,tDNAlooka
tggttgtagtccgtgcgaga

SEQ ID NO: 5185 - DNA, 21 bp, homo sapiens
  tDNAMT_GluTTC_MT_-_14674_14742@47.67.21,tDNAlooka
tggttgtagtccgtgcgagaa

SEQ ID NO: 5186 - DNA, 22 bp, homo sapiens
  tDNAMT_GluTTC_MT_-_14674_14742@47.68.22,tDNAlooka
tggttgtagtccgtgcgagaat

SEQ ID NO: 5187 - DNA, 23 bp, homo sapiens
  tDNAMT_GluTTC_MT_-_14674_14742@47.69.23,tDNAlooka
tggttgtagtccgtgcgagaata

SEQ ID NO: 5188 - DNA, 24 bp, homo sapiens
  tDNAMT_GluTTC_MT_-_14674_14742@47.70.24,tDNAlooka
tggttgtagtccgtgcgagaatac

SEQ ID NO: 5189 - DNA, 25 bp, homo sapiens
  tDNAMT_GluTTC_MT_-_14674_14742@47.71.25,tDNAlooka
tggttgtagtccgtgcgagaatacc

SEQ ID NO: 5190 - DNA, 26 bp, homo sapiens
  tDNAMT_GluTTC_MT_-_14674_14742@47.72.26,tDNAlooka
tggttgtagtccgtgcgagaatacca

SEQ ID NO: 5191 - DNA, 22 bp, homo sapiens
  tDNA5_GluTTC_13_-_41634874_41634945@29.50.22,tDNA
tggttttcacccaggtggcccg

SEQ ID NO: 5192 - DNA, 19 bp, homo sapiens
  tDNAMT_GluTTC_MT_-_14674_14742@25.43.19,tDNAlooka
tggtttttcatatcattgg

SEQ ID NO: 5193 - DNA, 21 bp, homo sapiens
  tDNAMT_GluTTC_MT_-_14674_14742@25.45.21,tDNAlooka
tggtttttcatatcattggtc

SEQ ID NO: 5194 - DNA, 22 bp, homo sapiens
  tDNAMT_GluTTC_MT_-_14674_14742@25.46.22,tDNAlooka
tggtttttcatatcattggtcg

SEQ ID NO: 5195 - DNA, 23 bp, homo sapiens
  tDNAMT_GluTTC_MT_-_14674_14742@25.47.23,tDNAlooka
tggtttttcatatcattggtcgt

SEQ ID NO: 5196 - DNA, 24 bp, homo sapiens
  tDNAMT_GluTTC_MT_-_14674_14742@25.48.24,tDNAlooka
tggtttttcatatcattggtcgtg

SEQ ID NO: 5197 - DNA, 25 bp, homo sapiens
  tDNAMT_GluTTC_MT_-_14674_14742@25.49.25,tDNAlooka
tggtttttcatatcattggtcgtgg

SEQ ID NO: 5198 - DNA, 28 bp, homo sapiens
  tDNAMT_GluTTC_MT_-_14674_14742@25.52.28,tDNAlooka
tggtttttcatatcattggtcgtggttg

SEQ ID NO: 5199 - DNA, 29 bp, homo sapiens
  tDNAMT_GluTTC_MT_-_14674_14742@25.53.29,tDNAlooka
tggtttttcatatcattggtcgtggttgt

SEQ ID NO: 5200 - DNA, 24 bp, homo sapiens
  tDNA22_GlnCTG_1_+_147800937_147801008@11.34.24,tr
tgtaatggtaagcactctggactc

SEQ ID NO: 5201 - DNA, 20 bp, homo sapiens
  tDNA15_GlnCTG_1_+_145963304_145963375@11.30.20,tr
tgtaatggtgagcactctgg

SEQ ID NO: 5202 - DNA, 21 bp, homo sapiens
  tDNA15_GlnCTG_1_+_145963304_145963375@11.31.21,tr
tgtaatggtgagcactctgga

SEQ ID NO: 5203 - DNA, 23 bp, homo sapiens
  tDNA15_GlnCTG_1_+_145963304_145963375@11.33.23,tr
tgtaatggtgagcactctggact

SEQ ID NO: 5204 - DNA, 24 bp, homo sapiens
  tDNA15_GlnCTG_1_+_145963304_145963375@11.34.24,tr
tgtaatggtgagcactctggactc

SEQ ID NO: 5205 - DNA, 19 bp, homo sapiens
  tDNA42_GlnCTG_6_+_27263212_27263283@11.29.19,tDNA
tgtaatggttagcactctg

SEQ ID NO: 5206 - DNA, 20 bp, homo sapiens
  tDNA42_GlnCTG_6_+_27263212_27263283@11.30.20,tDNA
tgtaatggttagcactctgg

SEQ ID NO: 5207 - DNA, 21 bp, homo sapiens
  tDNA42_GlnCTG_6_+_27263212_27263283@11.31.21,tDNA
tgtaatggttagcactctgga

SEQ ID NO: 5208 - DNA, 22 bp, homo sapiens
  tDNA42_GlnCTG_6_+_27263212_27263283@11.32.22,tDNA
tgtaatggttagcactctggac

SEQ ID NO: 5209 - DNA, 23 bp, homo sapiens
  tDNA42_GlnCTG_6_+_27263212_27263283@11.33.23,tDNA
tgtaatggttagcactctggact

SEQ ID NO: 5210 - DNA, 24 bp, homo sapiens
  tDNA42_GlnCTG_6_+_27263212_27263283@11.34.24,tDNA
tgtaatggttagcactctggactc

SEQ ID NO: 5211 - DNA, 25 bp, homo sapiens
  tDNA42_GlnCTG_6_+_27263212_27263283@11.35.25,tDNA
tgtaatggttagcactctggactct

SEQ ID NO: 5212 - DNA, 21 bp, homo sapiens
  tDNAMT_GluTTC_MT_-_14674_14742@51.71.21,tDNAlooka
tgtagtccgtgcgagaatacc

SEQ ID NO: 5213 - DNA, 22 bp, homo sapiens
  tDNAMT_GluTTC_MT_-_14674_14742@51.72.22,tDNAlooka
tgtagtccgtgcgagaatacca

SEQ ID NO: 5214 - DNA, 19 bp, homo sapiens
  tDNA145_SerAGA_6_-_27521192_27521273@-1T.18.19,tr
tgtagtcgtggccgagtgg

SEQ ID NO: 5215 - DNA, 22 bp, homo sapiens
  tDNA136_ValAAC_6_-_27648885_27648957@11.32.22,trn
tgtagtggttatcacgttcgcc

SEQ ID NO: 5216 - DNA, 25 bp, homo sapiens
  tDNA1_TrpCCA_7_+_99067307_99067378@51.75.25,tDNA6
tgttcaaatcacgtcggggtcacca

SEQ ID NO: 5217 - DNA, 25 bp, homo sapiens
  tDNA12_TrpCCA_17_+_19411494_19411565@51.75.25
tgttcaagtcacgtcggggtcacca

SEQ ID NO: 5218 - DNA, 25 bp, homo sapiens
  tDNA6_TrpCCA_12_+_98898030_98898101@51.75.25
tgttcgaatcacgtcggggtcacca

SEQ ID NO: 5219 - DNA, 27 bp, homo sapiens
  tDNAMT_MetCAT_MT_+_4402_4469@44.70.27
tgttggttatacccttcccgtactacc

SEQ ID NO: 5220 - DNA, 28 bp, homo sapiens
  tDNAMT_MetCAT_MT_+_4402_4469@44.71.28
tgttggttatacccttcccgtactacca

SEQ ID NO: 5221 - DNA, 16 bp, homo sapiens
  tDNAMT_PheGAA_MT_+_577_647@40.55.16
tgtttagacgggctca

SEQ ID NO: 5222 - DNA, 17 bp, homo sapiens
  tDNAMT_PheGAA_MT_+_577_647@40.56.17
tgtttagacgggctcac

SEQ ID NO: 5223 - DNA, 18 bp, homo sapiens
  tDNAMT_PheGAA_MT_+_577_647@40.57.18
tgtttagacgggctcaca

SEQ ID NO: 5224 - DNA, 19 bp, homo sapiens
  tDNAMT_PheGAA_MT_+_577_647@40.58.19
tgtttagacgggctcacat

SEQ ID NO: 5225 - DNA, 22 bp, homo sapiens
  tDNAMT_PheGAA_MT_+_577_647@40.61.22
tgtttagacgggctcacatcac

SEQ ID NO: 5226 - DNA, 24 bp, homo sapiens
  tDNAMT_PheGAA_MT_+_577_647@40.63.24
tgtttagacgggctcacatcaccc

SEQ ID NO: 5227 - DNA, 25 bp, homo sapiens
  tDNAMT_PheGAA_MT_+_577_647@40.64.25
tgtttagacgggctcacatcacccc

SEQ ID NO: 5228 - DNA, 26 bp, homo sapiens
  tDNAMT_PheGAA_MT_+_577_647@40.65.26
tgtttagacgggctcacatcacccca

SEQ ID NO: 5229 - DNA, 29 bp, homo sapiens
  tDNAMT_PheGAA_MT_+_577_647@40.68.29
tgtttagacgggctcacatcaccccataa

SEQ ID NO: 5230 - DNA, 21 bp, homo sapiens
  tDNAMT_IleGAT_MT_+_4263_4331@51.71.21
ttaaacccccttatttctacc

SEQ ID NO: 5231 - DNA, 22 bp, homo sapiens
  tDNAMT_IleGAT_MT_+_4263_4331@51.72.22
ttaaacccccttatttctacca

SEQ ID NO: 5232 - DNA, 19 bp, homo sapiens
  tDNAMT_ProTGG_MT_-_15956_16023@50.68.19
ttaaagactttttctctga

SEQ ID NO: 5233 - DNA, 20 bp, homo sapiens
  tDNAMT_ProTGG_MT_-_15956_16023@50.69.20
ttaaagactttttctctgac

SEQ ID NO: 5234 - DNA, 21 bp, homo sapiens
  tDNAMT_ProTGG_MT_-_15956_16023@50.70.21
ttaaagactttttctctgacc

SEQ ID NO: 5235 - DNA, 22 bp, homo sapiens
  tDNAMT_ProTGG_MT_-_15956_16023@50.71.22
ttaaagactttttctctgacca

SEQ ID NO: 5236 - DNA, 29 bp, homo sapiens
  tDNAMT_LysTTT_MT_+_8295_8364@35.63.29,tDNAlookali
ttaaagattaagagaaccaacacctcttt

SEQ ID NO: 5237 - DNA, 22 bp, homo sapiens
  tDNAMT_HisGTG_MT_+_12138_12206@12.33.22
ttaaccaaaacatcagattgtg

SEQ ID NO: 5238 - DNA, 23 bp, homo sapiens
  tDNAMT_HisGTG_MT_+_12138_12206@12.34.23
ttaaccaaaacatcagattgtga

SEQ ID NO: 5239 - DNA, 24 bp, homo sapiens
  tDNAMT_HisGTG_MT_+_12138_12206@12.35.24
ttaaccaaaacatcagattgtgaa

SEQ ID NO: 5240 - DNA, 25 bp, homo sapiens
  tDNAMT_HisGTG_MT_+_12138_12206@12.36.25
ttaaccaaaacatcagattgtgaat

SEQ ID NO: 5241 - DNA, 22 bp, homo sapiens
  tDNA103_AsnGTT_1_-_149230570_149230643@36.57.22,t
ttaaccgaaaggttggtggttc

SEQ ID NO: 5242 - DNA, 23 bp, homo sapiens
  tDNA103_AsnGTT_1_-_149230570_149230643@36.58.23,t
ttaaccgaaaggttggtggttcg

SEQ ID NO: 5243 - DNA, 24 bp, homo sapiens
  tDNA103_AsnGTT_1_-_149230570_149230643@36.59.24,t
ttaaccgaaaggttggtggttcga

SEQ ID NO: 5244 - DNA, 19 bp, homo sapiens
  tDNAMT_AsnGTT_MT_-_5657_5729@35.53.19,tDNAlookali
ttaactaagtgtttgtggg

SEQ ID NO: 5245 - DNA, 21 bp, homo sapiens
  tDNAMT_AsnGTT_MT_-_5657_5729@35.55.21,tDNAlookali
ttaactaagtgtttgtgggtt

SEQ ID NO: 5246 - DNA, 22 bp, homo sapiens
  tDNAMT_AsnGTT_MT_-_5657_5729@35.56.22,tDNAlookali
ttaactaagtgtttgtgggttt

SEQ ID NO: 5247 - DNA, 23 bp, homo sapiens
  tDNAMT_AsnGTT_MT_-_5657_5729@35.57.23,tDNAlookali
ttaactaagtgtttgtgggttta

SEQ ID NO: 5248 - DNA, 25 bp, homo sapiens
  tDNAMT_AsnGTT_MT_-_5657_5729@35.59.25,tDNAlookali
ttaactaagtgtttgtgggtttaag

SEQ ID NO: 5249 - DNA, 26 bp, homo sapiens
  tDNAMT_AsnGTT_MT_-_5657_5729@35.60.26,tDNAlookali
ttaactaagtgtttgtgggtttaagt

SEQ ID NO: 5250 - DNA, 16 bp, homo sapiens
  tDNAMT_ValTAC_MT_+_1602_1670@52.67.16
ttaacttgaccgctct

SEQ ID NO: 5251 - DNA, 17 bp, homo sapiens
  tDNAMT_ValTAC_MT_+_1602_1670@52.68.17
ttaacttgaccgctctg

SEQ ID NO: 5252 - DNA, 18 bp, homo sapiens
  tDNAMT_ValTAC_MT_+_1602_1670@52.69.18
ttaacttgaccgctctga

SEQ ID NO: 5253 - DNA, 19 bp, homo sapiens
  tDNAMT_ValTAC_MT_+_1602_1670@52.70.19
ttaacttgaccgctctgac

SEQ ID NO: 5254 - DNA, 20 bp, homo sapiens
  tDNAMT_ValTAC_MT_+_1602_1670@52.71.20
ttaacttgaccgctctgacc

SEQ ID NO: 5255 - DNA, 21 bp, homo sapiens
  tDNAMT_ValTAC_MT_+_1602_1670@52.72.21
ttaacttgaccgctctgacca

SEQ ID NO: 5256 - DNA, 30 bp, homo sapiens
  tDNAMT_LysTTT_MT_+_8295_8364@42.71.30,tDNAlookali
ttaagagaaccaacacctctttacagtgac

SEQ ID NO: 5257 - DNA, 22 bp, homo sapiens
  tDNAMT_AsnGTT_MT_-_5657_5729@55.76.22,tDNAlookali
ttaagtcccattggtctagcca

SEQ ID NO: 5258 - DNA, 20 bp, homo sapiens
  tDNA13_LysCTT_16_+_3246153_3246225@35.54.20,tDNA8
ttaatctcagggtcgtgggt

SEQ ID NO: 5259 - DNA, 22 bp, homo sapiens
  tDNA12_LysTTT_14_-_74055529_74055601@35.56.22,trn
ttaatctgagggtccagggttc

SEQ ID NO: 5260 - DNA, 29 bp, homo sapiens
  tDNAMT_ValTAC_MT_+_1602_1670@31.59.29
ttacacttaggagatttcaacttaacttg

SEQ ID NO: 5261 - DNA, 21 bp, homo sapiens
  tDNAMT_HisGTG_MT_+_12138_12206@51.71.21
ttacgaccccttatttacccc

SEQ ID NO: 5262 - DNA, 22 bp, homo sapiens
  tDNAMT_HisGTG_MT_+_12138_12206@51.72.22
ttacgaccccttatttacccca

SEQ ID NO: 5263 - DNA, 18 bp, homo sapiens
  tDNAMT_ProTGG_MT_-_15956_16023@17.34.18
ttagaatcttagctttgg

SEQ ID NO: 5264 - DNA, 26 bp, homo sapiens
  tDNAMT_PheGAA_MT_+_577_647@43.68.26
ttagacgggctcacatcaccccataa

SEQ ID NO: 5265 - DNA, 16 bp, homo sapiens
  tDNA42_GlnCTG_6_+_27263212_27263283@19.34.16,tDNA
ttagcactctggactc

SEQ ID NO: 5266 - DNA, 17 bp, homo sapiens
  tDNA42_GlnCTG_6_+_27263212_27263283@19.35.17,tDNA
ttagcactctggactct

SEQ ID NO: 5267 - DNA, 18 bp, homo sapiens
  tDNA42_GlnCTG_6_+_27263212_27263283@19.36.18,tDNA
ttagcactctggactctg

SEQ ID NO: 5268 - DNA, 19 bp, homo sapiens
  tDNA42_GlnCTG_6_+_27263212_27263283@19.37.19,tDNA
ttagcactctggactctga

SEQ ID NO: 5269 - DNA, 20 bp, homo sapiens
  tDNA42_GlnCTG_6_+_27263212_27263283@19.38.20,tDNA
ttagcactctggactctgaa

SEQ ID NO: 5270 - DNA, 21 bp, homo sapiens
  tDNA42_GlnCTG_6_+_27263212_27263283@19.39.21,tDNA
ttagcactctggactctgaat

SEQ ID NO: 5271 - DNA, 22 bp, homo sapiens
  tDNA42_GlnCTG_6_+_27263212_27263283@19.40.22,tDNA
ttagcactctggactctgaatc

SEQ ID NO: 5272 - DNA, 23 bp, homo sapiens
  tDNA42_GlnCTG_6_+_27263212_27263283@19.41.23,tDNA
ttagcactctggactctgaatcc

SEQ ID NO: 5273 - DNA, 24 bp, homo sapiens
  tDNA146_GlnCTG_6_-_27515531_27515602@19.42.24,trn
ttagcactctggactctgaatcca

SEQ ID NO: 5274 - DNA, 25 bp, homo sapiens
  tDNA146_GlnCTG_6_-_27515531_27515602@19.43.25,trn
ttagcactctggactctgaatccag

SEQ ID NO: 5275 - DNA, 26 bp, homo sapiens
  tDNA146_GlnCTG_6_-_27515531_27515602@19.44.26,trn
ttagcactctggactctgaatccagc

SEQ ID NO: 5276 - DNA, 27 bp, homo sapiens
  tDNA146_GlnCTG_6_-_27515531_27515602@19.45.27,trn
ttagcactctggactctgaatccagcg

SEQ ID NO: 5277 - DNA, 18 bp, homo sapiens
  tDNA130_GlnTTG_6_-_27763640_27763711@19.36.18,trn
ttagcactctggactttg

SEQ ID NO: 5278 - DNA, 19 bp, homo sapiens
  tDNA130_GlnTTG_6_-_27763640_27763711@19.37.19,trn
ttagcactctggactttga

SEQ ID NO: 5279 - DNA, 20 bp, homo sapiens
  tDNA130_GlnTTG_6_-_27763640_27763711@19.38.20,trn
ttagcactctggactttgaa

SEQ ID NO: 5280 - DNA, 21 bp, homo sapiens
  tDNA130_GlnTTG_6_-_27763640_27763711@19.39.21,trn
ttagcactctggactttgaat

SEQ ID NO: 5281 - DNA, 22 bp, homo sapiens
  tDNA130_GlnTTG_6_-_27763640_27763711@19.40.22,trn
ttagcactctggactttgaatc

SEQ ID NO: 5282 - DNA, 23 bp, homo sapiens
  tDNA130_GlnTTG_6_-_27763640_27763711@19.41.23,trn
ttagcactctggactttgaatcc

SEQ ID NO: 5283 - DNA, 24 bp, homo sapiens
  tDNA130_GlnTTG_6_-_27763640_27763711@19.42.24,trn
ttagcactctggactttgaatcca

SEQ ID NO: 5284 - DNA, 26 bp, homo sapiens
  tDNA130_GlnTTG_6_-_27763640_27763711@19.44.26,trn
ttagcactctggactttgaatccagc

SEQ ID NO: 5285 - DNA, 22 bp, homo sapiens
  tDNA135_AsnGTT_1_-_16858893_16858966@20.41.22,trn
ttagcgcgttcggctgttaacc

SEQ ID NO: 5286 - DNA, 26 bp, homo sapiens
  tDNAMT_ValTAC_MT_+_1602_1670@37.62.26
ttaggagatttcaacttaacttgacc

SEQ ID NO: 5287 - DNA, 29 bp, homo sapiens
  tDNAMT_ValTAC_MT_+_1602_1670@37.65.29
ttaggagatttcaacttaacttgaccgct

SEQ ID NO: 5288 - DNA, 30 bp, homo sapiens
  tDNAMT_ValTAC_MT_+_1602_1670@37.66.30
ttaggagatttcaacttaacttgaccgctc

SEQ ID NO: 5289 - DNA, 19 bp, homo sapiens
  tDNA25_GluCTC_2_-_71273488_71273560@19.37.19,tDNA
ttaggattcggcgctctca

SEQ ID NO: 5290 - DNA, 20 bp, homo sapiens
  tDNA10_GluCTC_3_-_103879524_103879595@19.38.20,tr
ttaggattcggcgctctcac

SEQ ID NO: 5291 - DNA, 21 bp, homo sapiens
  tDNA10_GluCTC_3_-_103879524_103879595@19.39.21,tr
ttaggattcggcgctctcacc

SEQ ID NO: 5292 - DNA, 23 bp, homo sapiens
  tDNA10_GluCTC_3_-_103879524_103879595@19.41.23,tr
ttaggattcggcgctctcaccgc

SEQ ID NO: 5293 - DNA, 17 bp, homo sapiens
  tDNAMT_TyrGTA_MT_-_5826_5891@49.65.17
ttaggcctctttttacc

SEQ ID NO: 5294 - DNA, 21 bp, homo sapiens
  tDNAMT_TyrGTA_MT_-_5826_5891@49.69.21
ttaggcctctttttaccacca

SEQ ID NO: 5295 - DNA, 16 bp, homo sapiens
  tDNA111_HisGTG_1_-_147774845_147774916@19.34.16,t
ttagtactctgcgttg

SEQ ID NO: 5296 - DNA, 17 bp, homo sapiens
  tDNA111_HisGTG_1_-_147774845_147774916@19.35.17,t
ttagtactctgcgttgt

SEQ ID NO: 5297 - DNA, 19 bp, homo sapiens
  tDNA111_HisGTG_1_-_147774845_147774916@19.37.19,t
ttagtactctgcgttgtgg

SEQ ID NO: 5298 - DNA, 20 bp, homo sapiens
  tDNA111_HisGTG_1_-_147774845_147774916@19.38.20,t
ttagtactctgcgttgtggc

SEQ ID NO: 5299 - DNA, 21 bp, homo sapiens
  tDNA111_HisGTG_1_-_147774845_147774916@19.39.21,t
ttagtactctgcgttgtggcc

SEQ ID NO: 5300 - DNA, 22 bp, homo sapiens
  tDNA111_HisGTG_1_-_147774845_147774916@19.40.22,t
ttagtactctgcgttgtggccg

SEQ ID NO: 5301 - DNA, 23 bp, homo sapiens
  tDNA111_HisGTG_1_-_147774845_147774916@19.41.23,t
ttagtactctgcgttgtggccgc

SEQ ID NO: 5302 - DNA, 24 bp, homo sapiens
  tDNA111_HisGTG_1_-_147774845_147774916@19.42.24,t
ttagtactctgcgttgtggccgca

SEQ ID NO: 5303 - DNA, 21 bp, homo sapiens
  tDNA131_GlyCCC_1_-_17004766_17004836@12.32.21
ttagtggtagaattctcgcct

SEQ ID NO: 5304 - DNA, 22 bp, homo sapiens
  tDNA29_IleTAT_6_+_26988125_26988218@34.55.22,tDNA
ttataatgccgaggttgtgagt

SEQ ID NO: 5305 - DNA, 19 bp, homo sapiens
  tDNAMT_MetCAT_MT_+_4402_4469@50.68.19
ttatacccttcccgtacta

SEQ ID NO: 5306 - DNA, 21 bp, homo sapiens
  tDNAMT_MetCAT_MT_+_4402_4469@50.70.21
ttatacccttcccgtactacc

SEQ ID NO: 5307 - DNA, 22 bp, homo sapiens
  tDNAMT_MetCAT_MT_+_4402_4469@50.71.22
ttatacccttcccgtactacca

SEQ ID NO: 5308 - DNA, 20 bp, homo sapiens
  tDNAMT_ArgTCG_MT_+_10405_10469@44.63.20
ttatgataatcatatttacc

SEQ ID NO: 5309 - DNA, 24 bp, homo sapiens
  tDNAMT_ArgTCG_MT_+_10405_10469@44.67.24
ttatgataatcatatttaccaacc

SEQ ID NO: 5310 - DNA, 25 bp, homo sapiens
  tDNAMT_ArgTCG_MT_+_10405_10469@44.68.25
ttatgataatcatatttaccaacca

SEQ ID NO: 5311 - DNA, 17 bp, homo sapiens
  tDNAMT_GlyTCC_MT_+_9991_10058@55.71.17
ttcaaaaaagagtacca

SEQ ID NO: 5312 - DNA, 19 bp, homo sapiens
  tDNAMT_CysGCA_MT_-_5761_5826@48.66.19
ttcaaacctgccggggctt

SEQ ID NO: 5313 - DNA, 20 bp, homo sapiens
  tDNAMT_CysGCA_MT_-_5761_5826@48.67.20
ttcaaacctgccggggcttc

SEQ ID NO: 5314 - DNA, 21 bp, homo sapiens
  tDNAMT_CysGCA_MT_-_5761_5826@48.68.21
ttcaaacctgccggggcttcc

SEQ ID NO: 5315 - DNA, 22 bp, homo sapiens
  tDNAMT_CysGCA_MT_-_5761_5826@48.69.22
ttcaaacctgccggggcttcca

SEQ ID NO: 5316 - DNA, 23 bp, homo sapiens
  tDNA1_TrpCCA_7_+_99067307_99067378@53.75.23,tDNA6
ttcaaatcacgtcggggtcacca

SEQ ID NO: 5317 - DNA, 17 bp, homo sapiens
  tDNA65_ProAGG_1_-_167684725_167684796@53.69.17,tr
ttcaaatcccggacgag

SEQ ID NO: 5318 - DNA, 23 bp, homo sapiens
  tDNA65_ProAGG_1_-_167684725_167684796@53.75.23,tr
ttcaaatcccggacgagccccca

SEQ ID NO: 5319 - DNA, 23 bp, homo sapiens
  tDNA42_GlnCTG_6_+_27263212_27263283@53.75.23,tDNA
ttcaaatctcggtggaacctcca

SEQ ID NO: 5320 - DNA, 23 bp, homo sapiens
  tDNA130_GlnTTG_6_-_27763640_27763711@53.75.23,trn
ttcaaatctcggtgggacctcca

SEQ ID NO: 5321 - DNA, 18 bp, homo sapiens
  tDNAMT_ValTAC_MT_+_1602_1670@46.63.18
ttcaacttaacttgaccg

SEQ ID NO: 5322 - DNA, 22 bp, homo sapiens
  tDNAMT_ValTAC_MT_+_1602_1670@46.67.22
ttcaacttaacttgaccgctct

SEQ ID NO: 5323 - DNA, 23 bp, homo sapiens
  tDNAMT_ValTAC_MT_+_1602_1670@46.68.23
ttcaacttaacttgaccgctctg

SEQ ID NO: 5324 - DNA, 24 bp, homo sapiens
  tDNAMT_ValTAC_MT_+_1602_1670@46.69.24
ttcaacttaacttgaccgctctga

SEQ ID NO: 5325 - DNA, 25 bp, homo sapiens
  tDNAMT_ValTAC_MT_+_1602_1670@46.70.25
ttcaacttaacttgaccgctctgac

SEQ ID NO: 5326 - DNA, 26 bp, homo sapiens
  tDNAMT_ValTAC_MT_+_1602_1670@46.71.26
ttcaacttaacttgaccgctctgacc

SEQ ID NO: 5327 - DNA, 27 bp, homo sapiens
  tDNAMT_ValTAC_MT_+_1602_1670@46.72.27
ttcaacttaacttgaccgctctgacca

SEQ ID NO: 5328 - DNA, 23 bp, homo sapiens
  tDNA12_TrpCCA_17_+_19411494_19411565@53.75.23
ttcaagtcacgtcggggtcacca

SEQ ID NO: 5329 - DNA, 23 bp, homo sapiens
  tDNA65_AlaAGC_6_+_28574933_28575004@53.75.23,tDNA
ttcaatccccggcacctccacca

SEQ ID NO: 5330 - DNA, 18 bp, homo sapiens
  tDNA5_GluTTC_13_-_41634874_41634945@34.51.18,tDNA
ttcacccaggtggcccgg

SEQ ID NO: 5331 - DNA, 17 bp, homo sapiens
  tDNA17_LeuCAG_16_+_57333863_57333945@33.49.17,trn
ttcaggtcgcagtctcc

SEQ ID NO: 5332 - DNA, 18 bp, homo sapiens
  tDNA17_LeuCAG_16_+_57333863_57333945@33.50.18,trn
ttcaggtcgcagtctccc

SEQ ID NO: 5333 - DNA, 19 bp, homo sapiens
  tDNA17_LeuCAG_16_+_57333863_57333945@33.51.19,trn
ttcaggtcgcagtctcccc

SEQ ID NO: 5334 - DNA, 18 bp, homo sapiens
  tDNA91_GlyCCC_1_-_149680210_149680280@11.28.18,tr
ttcagtggtagaattctc

SEQ ID NO: 5335 - DNA, 19 bp, homo sapiens
  tDNA91_GlyCCC_1_-_149680210_149680280@11.29.19,tr
ttcagtggtagaattctcg

SEQ ID NO: 5336 - DNA, 20 bp, homo sapiens
  tDNA91_GlyCCC_1_-_149680210_149680280@11.30.20,tr
ttcagtggtagaattctcgc

SEQ ID NO: 5337 - DNA, 21 bp, homo sapiens
  tDNA91_GlyCCC_1_-_149680210_149680280@11.31.21,tr
ttcagtggtagaattctcgcc

SEQ ID NO: 5338 - DNA, 22 bp, homo sapiens
  tDNA91_GlyCCC_1_-_149680210_149680280@11.32.22,tr
ttcagtggtagaattctcgcct

SEQ ID NO: 5339 - DNA, 23 bp, homo sapiens
  tDNA18_GlyGCC_16_+_70822597_70822667@11.33.23,trn
ttcagtggtagaattctcgcctg

SEQ ID NO: 5340 - DNA, 24 bp, homo sapiens
  tDNA18_GlyGCC_16_+_70822597_70822667@11.34.24,trn
ttcagtggtagaattctcgcctgc

SEQ ID NO: 5341 - DNA, 19 bp, homo sapiens
  tDNAMT_GluTTC_MT_-_14674_14742@31.49.19,tDNAlooka
ttcatatcattggtcgtgg

SEQ ID NO: 5342 - DNA, 22 bp, homo sapiens
  tDNAMT_GluTTC_MT_-_14674_14742@31.52.22,tDNAlooka
ttcatatcattggtcgtggttg

SEQ ID NO: 5343 - DNA, 25 bp, homo sapiens
  tDNAMT_GluTTC_MT_-_14674_14742@31.55.25,tDNAlooka
ttcatatcattggtcgtggttgtag

SEQ ID NO: 5344 - DNA, 26 bp, homo sapiens
  tDNAMT_GluTTC_MT_-_14674_14742@31.56.26,tDNAlooka
ttcatatcattggtcgtggttgtagt

SEQ ID NO: 5345 - DNA, 30 bp, homo sapiens
  tDNAMT_GluTTC_MT_-_14674_14742@31.60.30,tDNAlooka
ttcatatcattggtcgtggttgtagtccgt

SEQ ID NO: 5346 - DNA, 18 bp, homo sapiens
  tDNA18_TyrGTA_14_-_21125623_21125716@59.76.18
ttccagctcgaaggacca

SEQ ID NO: 5347 - DNA, 28 bp, homo sapiens
  tDNA42_GlnCTG_6_+_27263212_27263283@3.30.28,tDNA1
ttccatggtgtaatggttagcactctgg

SEQ ID NO: 5348 - DNA, 23 bp, homo sapiens
  tDNA5_GluTTC_13_-_41634874_41634945@-1T.22.23,trn
ttcccatatggtctagcggttag

SEQ ID NO: 5349 - DNA, 24 bp, homo sapiens
  tDNA5_GluTTC_13_-_41634874_41634945@-1T.23.24,trn
ttcccatatggtctagcggttagg

SEQ ID NO: 5350 - DNA, 18 bp, homo sapiens
  tDNA10_GlyTCC_17_+_8124866_8124937@58.75.18,tDNA1
ttcccggccaacgcacca

SEQ ID NO: 5351 - DNA, 18 bp, homo sapiens
  tDNA2_GlyCCC_1_+_17053780_17053850@57.74.18,tDNA1
ttcccggccaatgcacca

SEQ ID NO: 5352 - DNA, 18 bp, homo sapiens
  tDNA35_GlyGCC_1_+_161413094_161413164@57.74.18,tr
ttcccggcccatgcacca

SEQ ID NO: 5353 - DNA, 18 bp, homo sapiens
  tDNA34_GlyCCC_16_-_686736_686806@57.74.18,tDNA27_
ttcccgggcggcgcacca

SEQ ID NO: 5354 - DNA, 23 bp, homo sapiens
  tDNA59_GluCTC_1_+_249168447_249168518@-1T.22.23,t
ttccctggtggtctagtggttag

SEQ ID NO: 5355 - DNA, 23 bp, homo sapiens
  tDNA1_ArgCCG_16_+_3200675_3200747@32.54.23,tDNA11
ttccggatcagaagattgagggt

SEQ ID NO: 5356 - DNA, 16 bp, homo sapiens
  tDNA19_TyrGTA_14_-_21121258_21121351@59.74.16,trn
ttccggctcgaaggac

SEQ ID NO: 5357 - DNA, 17 bp, homo sapiens
  tDNA19_TyrGTA_14_-_21121258_21121351@59.75.17,trn
ttccggctcgaaggacc

SEQ ID NO: 5358 - DNA, 18 bp, homo sapiens
  tDNA19_TyrGTA_14_-_21121258_21121351@59.76.18,trn
ttccggctcgaaggacca

SEQ ID NO: 5359 - DNA, 18 bp, homo sapiens
  tDNA86_ValTAC_6_-_156869046_156869120@61.78.18,tr
ttcctcttcttaacacca

SEQ ID NO: 5360 - DNA, 18 bp, homo sapiens
  tDNA32_SerTGA_17_-_22028179_22028247@55.72.18,trn
ttccttccttttttgcca

SEQ ID NO: 5361 - DNA, 23 bp, homo sapiens
  tDNA152_ValCAC_6_-_27248049_27248121@54.76.23
ttcgaaaccgggcagaagcacca

SEQ ID NO: 5362 - DNA, 23 bp, homo sapiens
  tDNA136_ValAAC_6_-_27648885_27648957@54.76.23,trn
ttcgaaaccgggcggaaacacca

SEQ ID NO: 5363 - DNA, 23 bp, homo sapiens
  tDNA6_TrpCCA_12_+_98898030_98898101@53.75.23
ttcgaatcacgtcggggtcacca

SEQ ID NO: 5364 - DNA, 23 bp, homo sapiens
  tDNA1_LeuAAG_14_+_21078291_21078372@63.85.23,tDNA
ttcgaatcccaccgctgccacca

SEQ ID NO: 5365 - DNA, 23 bp, homo sapiens
  tDNA34_LeuCAG_1_+_161411323_161411405@64.86.23,tr
ttcgaatcccactcctgacacca

SEQ ID NO: 5366 - DNA, 23 bp, homo sapiens
  tDNA17_LeuCAG_16_+_57333863_57333945@64.86.23,trn
ttcgaatcccacttctgacacca

SEQ ID NO: 5367 - DNA, 23 bp, homo sapiens
  tDNA40_ThrAGT_17_-_8042770_8042843@55.77.23,tDNA3
ttcgaatcccagcggtgcctcca

SEQ ID NO: 5368 - DNA, 23 bp, homo sapiens
  tDNA175_SerGCT_6_-_26305718_26305801@65.87.23,trn
ttcgaatcccatcctcgtcgcca

SEQ ID NO: 5369 - DNA, 23 bp, homo sapiens
  tDNA14_TyrGTA_6_+_26569086_26569176@54.76.23,tDNA
ttcgaatccggctcgaaggacca

SEQ ID NO: 5370 - DNA, 23 bp, homo sapiens
  tDNA16_TyrGTA_6_+_26577332_26577420@54.76.23,tDNA
ttcgaatccggctcggaggacca

SEQ ID NO: 5371 - DNA, 23 bp, homo sapiens
  tDNA145_SerAGA_6_-_27521192_27521273@63.85.23,trn
ttcgaatcctgccgactacgcca

SEQ ID NO: 5372 - DNA, 23 bp, homo sapiens
  tDNA3_GluTTC_13_-_45492062_45492133@53.75.23,tDNA
ttcgactcccggtgtgggaacca

SEQ ID NO: 5373 - DNA, 23 bp, homo sapiens
  tDNA16_ValTAC_11_-_59318460_59318532@54.76.23,trn
ttcgagccccagtggaaccacca

SEQ ID NO: 5374 - DNA, 23 bp, homo sapiens
  tDNA9_ArgTCT_1_+_94313129_94313213@54.76.23
ttcgagtcccggcggagtcgcca

SEQ ID NO: 5375 - DNA, 23 bp, homo sapiens
  tDNA112_GlnCTG_1_-_147737382_147737453@53.75.23,t
ttcgagtctcggtggaacctcca

SEQ ID NO: 5376 - DNA, 21 bp, homo sapiens
  tDNA19_TyrGTA_14_-_21121258_21121351@3.23.21,tDNA
ttcgatagctcagctggtaga

SEQ ID NO: 5377 - DNA, 23 bp, homo sapiens
  tDNA120_AlaAGC_6_-_28626014_28626085@53.75.23
ttcgatccccagcatctccacca

SEQ ID NO: 5378 - DNA, 23 bp, homo sapiens
  tDNA119_AlaCGC_6_-_28641613_28641684@53.75.23,trn
ttcgatccccggcatctccacca

SEQ ID NO: 5379 - DNA, 23 bp, homo sapiens
  tDNA15_PheGAA_11_-_59324970_59325042@54.76.23,trn
ttcgatcccgggtttcggcacca

SEQ ID NO: 5380 - DNA, 23 bp, homo sapiens
  tDNA10_GlyTCC_17_+_8124866_8124937@53.75.23,tDNA1
ttcgattcccggccaacgcacca

SEQ ID NO: 5381 - DNA, 23 bp, homo sapiens
  tDNA34_GlyCCC_16_-_686736_686806@52.74.23,tDNA27_
ttcgattcccgggcggcgcacca

SEQ ID NO: 5382 - DNA, 23 bp, homo sapiens
  tDNA19_TyrGTA_14_-_21121258_21121351@54.76.23,trn
ttcgattccggctcgaaggacca

SEQ ID NO: 5383 - DNA, 22 bp, homo sapiens
  tDNAMT_SerTGA_MT_-_7446_7514@50.71.22,tDNAlookali
ttcgattccttccttttttgcc

SEQ ID NO: 5384 - DNA, 23 bp, homo sapiens
  tDNAMT_SerTGA_MT_-_7446_7514@50.72.23,tDNAlookali
ttcgattccttccttttttgcca

SEQ ID NO: 5385 - DNA, 18 bp, homo sapiens
  tDNAMT_GlnTTG_MT_-_4329_4400@58.75.18,tDNAlookali
ttctcatagtcctagcca

SEQ ID NO: 5386 - DNA, 16 bp, homo sapiens
  tDNA25_GlyGCC_16_-_70812114_70812184@24.39.16,trn
ttctcgcctgccacgc

SEQ ID NO: 5387 - DNA, 25 bp, homo sapiens
  tDNA25_GlyGCC_16_-_70812114_70812184@24.48.25,trn
ttctcgcctgccacgcgggaggccc

SEQ ID NO: 5388 - DNA, 29 bp, homo sapiens
  tDNA25_GlyGCC_16_-_70812114_70812184@24.52.29,trn
ttctcgcctgccacgcgggaggcccgggt

SEQ ID NO: 5389 - DNA, 18 bp, homo sapiens
  tDNA21_ThrTGT_14_-_21081949_21082021@59.76.18
ttctcgctggggcctcca

SEQ ID NO: 5390 - DNA, 18 bp, homo sapiens
  tDNA152_ValCAC_6_-_27248049_27248121@3.20.18
ttctgtagtgtagtggtt

SEQ ID NO: 5391 - DNA, 23 bp, homo sapiens
  tDNAMT_SerTGA_MT_-_7446_7514@30.52.23,tDNAlookali
ttgaaaccagctttggggggttc

SEQ ID NO: 5392 - DNA, 24 bp, homo sapiens
  tDNAMT_SerTGA_MT_-_7446_7514@30.53.24,tDNAlookali
ttgaaaccagctttggggggttcg

SEQ ID NO: 5393 - DNA, 16 bp, homo sapiens
  tDNAMT_ValTAC_MT_+_1602_1670@57.72.16
ttgaccgctctgacca

SEQ ID NO: 5394 - DNA, 27 bp, homo sapiens
  tDNA12_CysGCA_3_-_17741392_17741464@28.54.27,tDNA
ttgactgcagatcaagaggtccccggt

SEQ ID NO: 5395 - DNA, 21 bp, homo sapiens
  tDNAMT_IleGAT_MT_+_4263_4331@28.48.21
ttgatagagtaaataatagga

SEQ ID NO: 5396 - DNA, 22 bp, homo sapiens
  tDNAMT_IleGAT_MT_+_4263_4331@28.49.22
ttgatagagtaaataataggag

SEQ ID NO: 5397 - DNA, 23 bp, homo sapiens
  tDNAMT_IleGAT_MT_+_4263_4331@28.50.23
ttgatagagtaaataataggagc

SEQ ID NO: 5398 - DNA, 22 bp, homo sapiens
  tDNAMT_TrpTCA_MT_+_5512_5579@50.71.22,tDNAlookali
ttgcaatacttaatttctgcca

SEQ ID NO: 5399 - DNA, 22 bp, homo sapiens
  tDNAMT_TyrGTA_MT_-_5826_5891@23.44.22
ttggactgtaaatctaaagaca

SEQ ID NO: 5400 - DNA, 18 bp, homo sapiens
  tDNA12_ProTGG_11_-_75946869_75946940@32.49.18
ttgggtccgagaggtccc

SEQ ID NO: 5401 - DNA, 22 bp, homo sapiens
  tDNA12_ProTGG_11_-_75946869_75946940@32.53.22
ttgggtccgagaggtcccgggt

SEQ ID NO: 5402 - DNA, 22 bp, homo sapiens
  tDNA6_ProTGG_14_+_21152175_21152246@32.53.22,tDNA
ttgggtgcgagaggtcccgggt

SEQ ID NO: 5403 - DNA, 23 bp, homo sapiens
  tDNA6_ProTGG_14_+_21152175_21152246@32.54.23,tDNA
ttgggtgcgagaggtcccgggtt

SEQ ID NO: 5404 - DNA, 21 bp, homo sapiens
  tDNAMT_ProTGG_MT_-_15956_16023@31.51.21
ttgggtgctaatggtggagtt

SEQ ID NO: 5405 - DNA, 22 bp, homo sapiens
  tDNAMT_ProTGG_MT_-_15956_16023@31.52.22
ttgggtgctaatggtggagtta

SEQ ID NO: 5406 - DNA, 23 bp, homo sapiens
  tDNAMT_ProTGG_MT_-_15956_16023@31.53.23
ttgggtgctaatggtggagttaa

SEQ ID NO: 5407 - DNA, 24 bp, homo sapiens
  tDNAMT_ProTGG_MT_-_15956_16023@31.54.24
ttgggtgctaatggtggagttaaa

SEQ ID NO: 5408 - DNA, 25 bp, homo sapiens
  tDNAMT_ProTGG_MT_-_15956_16023@31.55.25
ttgggtgctaatggtggagttaaag

SEQ ID NO: 5409 - DNA, 27 bp, homo sapiens
  tDNAMT_ProTGG_MT_-_15956_16023@31.57.27
ttgggtgctaatggtggagttaaagac

SEQ ID NO: 5410 - DNA, 21 bp, homo sapiens
  tDNA14_TyrGTA_6_+_26569086_26569176@16.36.21,tDNA
ttggtagagcggaggactgta

SEQ ID NO: 5411 - DNA, 22 bp, homo sapiens
  tDNA14_TyrGTA_6_+_26569086_26569176@16.37.22,tDNA
ttggtagagcggaggactgtag

SEQ ID NO: 5412 - DNA, 16 bp, homo sapiens
  tDNAMT_GluTTC_MT_-_14674_14742@40.55.16,tDNAlooka
ttggtcgtggttgtag

SEQ ID NO: 5413 - DNA, 17 bp, homo sapiens
  tDNAMT_GluTTC_MT_-_14674_14742@40.56.17,tDNAlooka
ttggtcgtggttgtagt

SEQ ID NO: 5414 - DNA, 18 bp, homo sapiens
  tDNAMT_GluTTC_MT_-_14674_14742@40.57.18,tDNAlooka
ttggtcgtggttgtagtc

SEQ ID NO: 5415 - DNA, 19 bp, homo sapiens
  tDNAMT_GluTTC_MT_-_14674_14742@40.58.19,tDNAlooka
ttggtcgtggttgtagtcc

SEQ ID NO: 5416 - DNA, 20 bp, homo sapiens
  tDNAMT_GluTTC_MT_-_14674_14742@40.59.20,tDNAlooka
ttggtcgtggttgtagtccg

SEQ ID NO: 5417 - DNA, 21 bp, homo sapiens
  tDNAMT_GluTTC_MT_-_14674_14742@40.60.21,tDNAlooka
ttggtcgtggttgtagtccgt

SEQ ID NO: 5418 - DNA, 22 bp, homo sapiens
  tDNAMT_GluTTC_MT_-_14674_14742@40.61.22,tDNAlooka
ttggtcgtggttgtagtccgtg

SEQ ID NO: 5419 - DNA, 23 bp, homo sapiens
  tDNAMT_GluTTC_MT_-_14674_14742@40.62.23,tDNAlooka
ttggtcgtggttgtagtccgtgc

SEQ ID NO: 5420 - DNA, 24 bp, homo sapiens
  tDNAMT_GluTTC_MT_-_14674_14742@40.63.24,tDNAlooka
ttggtcgtggttgtagtccgtgcg

SEQ ID NO: 5421 - DNA, 25 bp, homo sapiens
  tDNAMT_GluTTC_MT_-_14674_14742@40.64.25,tDNAlooka
ttggtcgtggttgtagtccgtgcga

SEQ ID NO: 5422 - DNA, 26 bp, homo sapiens
  tDNAMT_GluTTC_MT_-_14674_14742@40.65.26,tDNAlooka
ttggtcgtggttgtagtccgtgcgag

SEQ ID NO: 5423 - DNA, 27 bp, homo sapiens
  tDNAMT_GluTTC_MT_-_14674_14742@40.66.27,tDNAlooka
ttggtcgtggttgtagtccgtgcgaga

SEQ ID NO: 5424 - DNA, 28 bp, homo sapiens
  tDNAMT_GluTTC_MT_-_14674_14742@40.67.28,tDNAlooka
ttggtcgtggttgtagtccgtgcgagaa

SEQ ID NO: 5425 - DNA, 29 bp, homo sapiens
  tDNAMT_GluTTC_MT_-_14674_14742@40.68.29,tDNAlooka
ttggtcgtggttgtagtccgtgcgagaat

SEQ ID NO: 5426 - DNA, 21 bp, homo sapiens
  tDNA65_ProAGG_1_-_167684725_167684796@7.27.21,trn
ttggtctaggggtatgattct

SEQ ID NO: 5427 - DNA, 24 bp, homo sapiens
  tDNA65_ProAGG_1_-_167684725_167684796@7.30.24,trn
ttggtctaggggtatgattctcgc

SEQ ID NO: 5428 - DNA, 25 bp, homo sapiens
  tDNA65_ProAGG_1_-_167684725_167684796@7.31.25,trn
ttggtctaggggtatgattctcgct

SEQ ID NO: 5429 - DNA, 25 bp, homo sapiens
  tDNA12_ProTGG_11_-_75946869_75946940@7.31.25
ttggtctaggggtatgattctcggt

SEQ ID NO: 5430 - DNA, 17 bp, homo sapiens
  tDNA133_GlyCCC_1_-_16872434_16872504@4.20.17,tDNA
ttggtggttcagtggta

SEQ ID NO: 5431 - DNA, 18 bp, homo sapiens
  tDNA133_GlyCCC_1_-_16872434_16872504@4.21.18,tDNA
ttggtggttcagtggtag

SEQ ID NO: 5432 - DNA, 19 bp, homo sapiens
  tDNA133_GlyCCC_1_-_16872434_16872504@4.22.19,tDNA
ttggtggttcagtggtaga

SEQ ID NO: 5433 - DNA, 20 bp, homo sapiens
  tDNA133_GlyCCC_1_-_16872434_16872504@4.23.20,tDNA
ttggtggttcagtggtagaa

SEQ ID NO: 5434 - DNA, 21 bp, homo sapiens
  tDNA133_GlyCCC_1_-_16872434_16872504@4.24.21,tDNA
ttggtggttcagtggtagaat

SEQ ID NO: 5435 - DNA, 23 bp, homo sapiens
  tDNA133_GlyCCC_1_-_16872434_16872504@4.26.23,tDNA
ttggtggttcagtggtagaattc

SEQ ID NO: 5436 - DNA, 24 bp, homo sapiens
  tDNA133_GlyCCC_1_-_16872434_16872504@4.27.24,tDNA
ttggtggttcagtggtagaattct

SEQ ID NO: 5437 - DNA, 25 bp, homo sapiens
  tDNA133_GlyCCC_1_-_16872434_16872504@4.28.25,tDNA
ttggtggttcagtggtagaattctc

SEQ ID NO: 5438 - DNA, 26 bp, homo sapiens
  tDNA133_GlyCCC_1_-_16872434_16872504@4.29.26,tDNA
ttggtggttcagtggtagaattctcg

SEQ ID NO: 5439 - DNA, 27 bp, homo sapiens
  tDNA133_GlyCCC_1_-_16872434_16872504@4.30.27,tDNA
ttggtggttcagtggtagaattctcgc

SEQ ID NO: 5440 - DNA, 28 bp, homo sapiens
  tDNA133_GlyCCC_1_-_16872434_16872504@4.31.28,tDNA
ttggtggttcagtggtagaattctcgcc

SEQ ID NO: 5441 - DNA, 30 bp, homo sapiens
  tDNA18_GlyGCC_16_+_70822597_70822667@4.33.30,tDNA
ttggtggttcagtggtagaattctcgcctg

SEQ ID NO: 5442 - DNA, 23 bp, homo sapiens
  tDNAMT_MetCAT_MT_+_4402_4469@46.68.23
ttggttatacccttcccgtacta

SEQ ID NO: 5443 - DNA, 25 bp, homo sapiens
  tDNAMT_MetCAT_MT_+_4402_4469@46.70.25
ttggttatacccttcccgtactacc

SEQ ID NO: 5444 - DNA, 26 bp, homo sapiens
  tDNAMT_MetCAT_MT_+_4402_4469@46.71.26
ttggttatacccttcccgtactacca

SEQ ID NO: 5445 - DNA, 19 bp, homo sapiens
  tDNA4_ThrTGT_14_+_21149849_21149921@33.51.19,tDNA
ttgtaaaccaggggtcgcg

SEQ ID NO: 5446 - DNA, 21 bp, homo sapiens
  tDNA4_ThrTGT_14_+_21149849_21149921@33.53.21,tDNA
ttgtaaaccaggggtcgcgag

SEQ ID NO: 5447 - DNA, 22 bp, homo sapiens
  tDNA4_ThrTGT_14_+_21149849_21149921@33.54.22,tDNA
ttgtaaaccaggggtcgcgagt

SEQ ID NO: 5448 - DNA, 16 bp, homo sapiens
  tDNAMT_GluTTC_MT_-_14674_14742@50.65.16,tDNAlooka
ttgtagtccgtgcgag

SEQ ID NO: 5449 - DNA, 17 bp, homo sapiens
  tDNAMT_GluTTC_MT_-_14674_14742@50.66.17,tDNAlooka
ttgtagtccgtgcgaga

SEQ ID NO: 5450 - DNA, 18 bp, homo sapiens
  tDNAMT_GluTTC_MT_-_14674_14742@50.67.18,tDNAlooka
ttgtagtccgtgcgagaa

SEQ ID NO: 5451 - DNA, 19 bp, homo sapiens
  tDNAMT_GluTTC_MT_-_14674_14742@50.68.19,tDNAlooka
ttgtagtccgtgcgagaat

SEQ ID NO: 5452 - DNA, 20 bp, homo sapiens
  tDNAMT_GluTTC_MT_-_14674_14742@50.69.20,tDNAlooka
ttgtagtccgtgcgagaata

SEQ ID NO: 5453 - DNA, 21 bp, homo sapiens
  tDNAMT_GluTTC_MT_-_14674_14742@50.70.21,tDNAlooka
ttgtagtccgtgcgagaatac

SEQ ID NO: 5454 - DNA, 22 bp, homo sapiens
  tDNAMT_GluTTC_MT_-_14674_14742@50.71.22,tDNAlooka
ttgtagtccgtgcgagaatacc

SEQ ID NO: 5455 - DNA, 23 bp, homo sapiens
  tDNAMT_GluTTC_MT_-_14674_14742@50.72.23,tDNAlooka
ttgtagtccgtgcgagaatacca

SEQ ID NO: 5456 - DNA, 16 bp, homo sapiens
  tDNAMT_HisGTG_MT_+_12138_12206@29.44.16
ttgtgaatctgacaac

SEQ ID NO: 5457 - DNA, 17 bp, homo sapiens
  tDNAMT_HisGTG_MT_+_12138_12206@29.45.17
ttgtgaatctgacaaca

SEQ ID NO: 5458 - DNA, 18 bp, homo sapiens
  tDNAMT_HisGTG_MT_+_12138_12206@29.46.18
ttgtgaatctgacaacag

SEQ ID NO: 5459 - DNA, 19 bp, homo sapiens
  tDNAMT_HisGTG_MT_+_12138_12206@29.47.19
ttgtgaatctgacaacaga

SEQ ID NO: 5460 - DNA, 20 bp, homo sapiens
  tDNAMT_HisGTG_MT_+_12138_12206@29.48.20
ttgtgaatctgacaacagag

SEQ ID NO: 5461 - DNA, 21 bp, homo sapiens
  tDNAMT_HisGTG_MT_+_12138_12206@29.49.21
ttgtgaatctgacaacagagg

SEQ ID NO: 5462 - DNA, 22 bp, homo sapiens
  tDNAMT_HisGTG_MT_+_12138_12206@29.50.22
ttgtgaatctgacaacagaggc

SEQ ID NO: 5463 - DNA, 23 bp, homo sapiens
  tDNAMT_HisGTG_MT_+_12138_12206@29.51.23
ttgtgaatctgacaacagaggct

SEQ ID NO: 5464 - DNA, 24 bp, homo sapiens
  tDNAMT_HisGTG_MT_+_12138_12206@29.52.24
ttgtgaatctgacaacagaggctt

SEQ ID NO: 5465 - DNA, 25 bp, homo sapiens
  tDNAMT_HisGTG_MT_+_12138_12206@29.53.25
ttgtgaatctgacaacagaggctta

SEQ ID NO: 5466 - DNA, 26 bp, homo sapiens
  tDNAMT_HisGTG_MT_+_12138_12206@29.54.26
ttgtgaatctgacaacagaggcttac

SEQ ID NO: 5467 - DNA, 27 bp, homo sapiens
  tDNAMT_HisGTG_MT_+_12138_12206@29.55.27
ttgtgaatctgacaacagaggcttacg

SEQ ID NO: 5468 - DNA, 29 bp, homo sapiens
  tDNAMT_HisGTG_MT_+_12138_12206@29.57.29
ttgtgaatctgacaacagaggcttacgac

SEQ ID NO: 5469 - DNA, 30 bp, homo sapiens
  tDNAMT_HisGTG_MT_+_12138_12206@29.58.30
ttgtgaatctgacaacagaggcttacgacc

SEQ ID NO: 5470 - DNA, 22 bp, homo sapiens
  tDNA111_HisGTG_1_-_147774845_147774916@32.53.22,t
ttgtggccgcagcaacctcggt

SEQ ID NO: 5471 - DNA, 23 bp, homo sapiens
  tDNAMT_HisGTG_MT_+_12138_12206@11.33.23
tttaaccaaaacatcagattgtg

SEQ ID NO: 5472 - DNA, 24 bp, homo sapiens
  tDNAMT_HisGTG_MT_+_12138_12206@11.34.24
tttaaccaaaacatcagattgtga

SEQ ID NO: 5473 - DNA, 23 bp, homo sapiens
  tDNAMT_AsnGTT_MT_-_5657_5729@54.76.23,tDNAlookali
tttaagtcccattggtctagcca

SEQ ID NO: 5474 - DNA, 18 bp, homo sapiens
  tDNAMT_LeuTAA_MT_+_3230_3304@42.59.18
tttacagtcagaggttca

SEQ ID NO: 5475 - DNA, 17 bp, homo sapiens
  tDNAMT_PheGAA_MT_+_577_647@42.58.17
tttagacgggctcacat

SEQ ID NO: 5476 - DNA, 22 bp, homo sapiens
  tDNA42_LeuTAG_17_-_8023632_8023713@33.54.22
tttaggctccagtctcttcgga

SEQ ID NO: 5477 - DNA, 18 bp, homo sapiens
  tDNAMT_ValTAC_MT_+_1602_1670@45.62.18
tttcaacttaacttgacc

SEQ ID NO: 5478 - DNA, 19 bp, homo sapiens
  tDNAMT_ValTAC_MT_+_1602_1670@45.63.19
tttcaacttaacttgaccg

SEQ ID NO: 5479 - DNA, 22 bp, homo sapiens
  tDNAMT_ValTAC_MT_+_1602_1670@45.66.22
tttcaacttaacttgaccgctc

SEQ ID NO: 5480 - DNA, 24 bp, homo sapiens
  tDNAMT_ValTAC_MT_+_1602_1670@45.68.24
tttcaacttaacttgaccgctctg

SEQ ID NO: 5481 - DNA, 25 bp, homo sapiens
  tDNAMT_ValTAC_MT_+_1602_1670@45.69.25
tttcaacttaacttgaccgctctga

SEQ ID NO: 5482 - DNA, 26 bp, homo sapiens
  tDNAMT_ValTAC_MT_+_1602_1670@45.70.26
tttcaacttaacttgaccgctctgac

SEQ ID NO: 5483 - DNA, 27 bp, homo sapiens
  tDNAMT_ValTAC_MT_+_1602_1670@45.71.27
tttcaacttaacttgaccgctctgacc

SEQ ID NO: 5484 - DNA, 28 bp, homo sapiens
  tDNAMT_ValTAC_MT_+_1602_1670@45.72.28
tttcaacttaacttgaccgctctgacca

SEQ ID NO: 5485 - DNA, 19 bp, homo sapiens
  tDNA5_GluTTC_13_-_41634874_41634945@33.51.19,tDNA
tttcacccaggtggcccgg

SEQ ID NO: 5486 - DNA, 30 bp, homo sapiens
  tDNAMT_GluTTC_MT_-_14674_14742@30.59.30,tDNAlooka
tttcatatcattggtcgtggttgtagtccg

SEQ ID NO: 5487 - DNA, 19 bp, homo sapiens
  tDNA15_ValAAC_5_-_180615416_180615488@2.20.19
tttccgtagtgtagtggtc

SEQ ID NO: 5488 - DNA, 24 bp, homo sapiens
  tDNAMT_IleGAT_MT_+_4263_4331@27.50.24
tttgatagagtaaataataggagc

SEQ ID NO: 5489 - DNA, 23 bp, homo sapiens
  tDNA8_AlaTGC_12_+_125424512_125424583@31.53.23
tttgcacgtatgaggccccgggt

SEQ ID NO: 5490 - DNA, 23 bp, homo sapiens
  tDNA13_AlaTGC_12_-_125406301_125406372@31.53.23,t
tttgcatgtatgaggccccgggt

SEQ ID NO: 5491 - DNA, 19 bp, homo sapiens
  tDNA12_ProTGG_11_-_75946869_75946940@31.49.19
tttgggtccgagaggtccc

SEQ ID NO: 5492 - DNA, 23 bp, homo sapiens
  tDNA12_ProTGG_11_-_75946869_75946940@31.53.23
tttgggtccgagaggtcccgggt

SEQ ID NO: 5493 - DNA, 19 bp, homo sapiens
  tDNA6_ProTGG_14_+_21152175_21152246@31.49.19,tDNA
tttgggtgcgagaggtccc

SEQ ID NO: 5494 - DNA, 23 bp, homo sapiens
  tDNA6_ProTGG_14_+_21152175_21152246@31.53.23,tDNA
tttgggtgcgagaggtcccgggt

SEQ ID NO: 5495 - DNA, 24 bp, homo sapiens
  tDNA6_ProTGG_14_+_21152175_21152246@31.54.24,tDNA
tttgggtgcgagaggtcccgggtt

SEQ ID NO: 5496 - DNA, 23 bp, homo sapiens
  tDNAMT_ProTGG_MT_-_15956_16023@30.52.23
tttgggtgctaatggtggagtta

SEQ ID NO: 5497 - DNA, 18 bp, homo sapiens
  tDNA3_GluTTC_13_-_45492062_45492133@32.49.18,tDNA
ttttcacccaggcggccc

SEQ ID NO: 5498 - DNA, 20 bp, homo sapiens
  tDNA5_GluTTC_13_-_41634874_41634945@32.51.20,tDNA
ttttcacccaggtggcccgg

SEQ ID NO: 5499 - DNA, 18 bp, homo sapiens
  tDNAMT_GluTTC_MT_-_14674_14742@29.46.18,tDNAlooka
ttttcatatcattggtcg

SEQ ID NO: 5500 - DNA, 21 bp, homo sapiens
  tDNAMT_GluTTC_MT_-_14674_14742@29.49.21,tDNAlooka
ttttcatatcattggtcgtgg

SEQ ID NO: 5501 - DNA, 24 bp, homo sapiens
  tDNAMT_GluTTC_MT_-_14674_14742@29.52.24,tDNAlooka
ttttcatatcattggtcgtggttg

SEQ ID NO: 5502 - DNA, 30 bp, homo sapiens
  tDNAMT_GluTTC_MT_-_14674_14742@29.58.30,tDNAlooka
ttttcatatcattggtcgtggttgtagtcc

SEQ ID NO: 5503 - DNA, 16 bp, homo sapiens
  tDNAMT_ThrTGT_MT_+_15888_15953@54.69.16
ttttccaaggacacca

SEQ ID NO: 5504 - DNA, 16 bp, homo sapiens
  tDNAMT_GluTTC_MT_-_14674_14742@28.43.16,tDNAlooka
tttttcatatcattgg

SEQ ID NO: 5505 - DNA, 19 bp, homo sapiens
  tDNAMT_GluTTC_MT_-_14674_14742@28.46.19,tDNAlooka
tttttcatatcattggtcg

SEQ ID NO: 5506 - DNA, 20 bp, homo sapiens
  tDNAMT_GluTTC_MT_-_14674_14742@28.47.20,tDNAlooka
tttttcatatcattggtcgt

SEQ ID NO: 5507 - DNA, 22 bp, homo sapiens
  tDNAMT_GluTTC_MT_-_14674_14742@28.49.22,tDNAlooka
tttttcatatcattggtcgtgg

SEQ ID NO: 5508 - DNA, 25 bp, homo sapiens
  tDNAMT_GluTTC_MT_-_14674_14742@28.52.25,tDNAlooka
tttttcatatcattggtcgtggttg

SEQ ID NO: 5509 - DNA, 30 bp, homo sapiens
  tDNAMT_GluTTC_MT_-_14674_14742@28.57.30,tDNAlooka
tttttcatatcattggtcgtggttgtagtc

SEQ ID NO: 5510 - DNA, 16 bp, homo sapiens
  tDNAMT_ThrTGT_MT_+_15888_15953@53.68.16
tttttccaaggacacc

SEQ ID NO: 5511 - DNA, 17 bp, homo sapiens
  tDNAMT_ThrTGT_MT_+_15888_15953@53.69.17
tttttccaaggacacca
